(19) United States
(12) Patent Application Publication
(10) Pub. No.: US 2026/0091139 A1
(43) Pub. Date: Apr. 2, 2026

(54) TREATMENT OF CARDIOMYOPATHY WITH AAV GENE THERAPY VECTORS

(71) Applicant: DINAQOR AG, Schlieren (CH)

(72) Inventors: Peter Cameron COLOSI, San Anselmo, CA (US); Pooja AGARWAL, Novato, CA (US); Wesley YONEMOTO, Novato, CA (US); Sergio VIEDMA-GONZALEZ, Novato, CA (US); Eduard AYUSO, Zürich (CH); Thomas VOIT, London (GB); Valeria RICOTTI, London (GB)

(21) Appl. No.: 19/113,698

(22) PCT Filed: Sep. 22, 2023
(86) PCT No.: PCT/US2023/074831

§ 371 Date: Mar. 20, 2025

Related U.S. Application Data
(60) Provisional application No. 63/376,712, filed on Sep. 22, 2022.
(60) Provisional application No. 63/519,967, filed on Aug. 16, 2023.

(51) Int. Cl. A61K 48/00; A61K 38/17; A61P 9/10; C12N 15/86

(52) U.S. Cl. CPC A61K 48/0058; A61K 38/1719; A61P 9/10; C12N 15/86; C12N 2750/14143; C12N 2750/14152

(57) ABSTRACT

Provided herein are gene therapy compositions and methods of treating reduced levels of functional cardiac myosin binding protein C in a subject having hypertrophic cardiomyopathy.

### CROSS REFERENCE TO RELATED APPLICATIONS

[0001] This application claims the benefit of priority to U.S. Provisional Patent Application Nos: 63/376,712, filed Sep. 22, 2022, and 63/519,967, filed Aug. 16, 2023, each of which is incorporated herein by reference in its entirety.

### FIELD

[0002] Provided herein are recombinant adeno-associated virus (rAAV) gene therapy vectors and virus particles useful in the treatment and prevention of hypertrophic cardiomyopathy by increasing expression of cardiac myosin binding protein C (cMyBP-C).

### INCORPORATION OF SEQUENCE LISTING

[0003] This instant patent application includes a sequence listing in electronic format (Filename: PCT_SeqListing.xml; created Sep. 6, 2023; 763,166 bytes) and is incorporated herein by reference in its entirety.

### BACKGROUND

[0004] While considerable progress has been made in the prevention of heart diseases that are caused by environmental factors, such as nicotine, hypercholesterolemia or diabetes, and in the symptomatic treatment of heart conditions, there is still a need for methods that improve the treatment of inherited cardiomyopathies. Among the cardiomyopathies that are caused by genetic factors are hypertrophic cardiomyopathy (HCM), dilated cardiomyopathy (DCM), and arrhythmogenic right ventricular cardiomyopathy (ARVC).

[0005] Hypertrophic cardiomyopathy is the most prevalent genetic heart disease and is characterized by unexplained left ventricular hypertrophy. Hypertrophic cardiomyopathy is associated with initially normal systolic, but impaired diastolic function (Elliott et al., Eur. Heart J. 29: 270-6 (2008); Gersch et al., J. Thorac. Cardiovasc. Surg. 142: e153-203 (2011). Hypertrophic cardiomyopathy has a particularly high prevalence of about 1:500 in the general population (Maron et al., Circulation, 92: 785-9 (1995), and is the leading cause of sudden cardiac death in younger people, particularly in athletes. Although HCM is a life-threatening disease, no curative treatment exists to date (Carrier et al., Cardiovasc. Res. 85:330-338 (2010); Schlossarek et al., J. Mol. Cell. Cardiol. 50: 613-20 (2011).

[0006] Inherited hypertrophic cardiomyopathy is a genetic disease which is known to be caused by more than 1000 different mutations in at least 10 genes that encode components of the cardiac sarcomere, such as cardiac myosin binding protein C (cMyBP-C), β-myosin heavy chain (MYH7), cardiac troponin T (TNNT2), cardiac troponin I (TNNI3), myosin ventricular essential light chain 1 (MYL3), myosin ventricular regulatory light chain 2 (MYL2), cardiac a actin (ACTC), a-tropomyosin (TPM1), titin (TTN), four-and-a-half LIM protein 1 (FHL1) (Richard et al., Circulation, 107: 2227-2232 (2003); Schlossarek et al., J. Mol. Cell Cardiol. 50: 613-20 (2011); Friedrich et al., Hum. Mol. Genet. 21: 3237-54 (2012). Many mutations are missense mutations which encode full-length mutant polypeptides, while other frameshift or splice-site mutations may result in truncations (Marian et al., Circ. Res. 121: 749-70 (2017); Walsh et al., Genet. Med. 19: 192-203 (2017). The most common truncated mutant polypeptides are MYBPC3 and FHL1, which exhibit mainly frameshift mutations leading to C-terminal truncated proteins.

[0007] The most frequently mutated gene in HCM is MYBPC3 which encodes cardiac myosin binding protein C (cMyBP-C) (Bonne et al., Nat. Genet. 11:438-40 (1995); Watkins et al., N. Engl. J. Med. 364: 1643-56 (2011). cMyBP-C is a major component of the A-band of the sarcomere, where it interacts with myosin, actin and titin (Schlossarek et al., J. Mol. Cell. Cardiol. 50: 613-20 (2011). In humans and mice cMyBP-C is exclusively detected in the heart (Fougerousse et al, Circ. Res. 82: 130-3 (1998) and is involved in the regulation of cardiac contraction and relaxation (Pohlmann et al., Circ. Res. Circ. Res. 101: 928-38 (2007); Schlossarek et al., J. Mol. Cell. Cardiol. 50: 613-20 (2011). About 70% of the mutations in the MYBPC3 gene result in a frameshift and produce C-terminal truncated proteins (Carrier et al., Circ. Res. 80: 427-34 (1997). Truncated proteins are unstable and have never been detected in myocardial tissue of patients (Marston et al., Circ. Res. 105: 219-22 (2009); van Dijk et al., Circulation, 119: 1473-83 (2009); van Dijk et al., Circ. Heart Fail. 5:36-46 (2012).

[0008] Current drug-based treatments of HCM alleviate the symptoms but do not treat the genetic cause underlying the disease. A gene-based or RNA-based therapy would be the only curative treatment for HCM. Gene therapeutic approaches have successfully been tested in connection with non-genetic cardiac diseases (Jessup et al., Circulation, 124: 304-13 (2011).

### SUMMARY

[0009] The embodiments described herein relate to a vector construct, a recombinant replication deficient AAV particle, cells, and pharmaceutical compositions for delivering cardiac myosin binding protein C (cMyBP-C) to a subject with HCM or a subject with a deficiency in a functional cardiac sarcomeric protein such as cMyBP-C. The embodiments described herein also relate to the use of such AAV particles or such vector constructs to deliver a gene encoding cMyBP-C to the myocardium of such subjects.

[0010] The gene therapy vector is suitable for use in treating or preventing HCM in a mammalian subject in need of treatment, preferably a human subject. In some embodiments, the subject in need of treatment is one that carries a mutation in at least one or both genes encoding cMyBP-C. After administration into the subject to be treated, the vector provides for the expression of the encoded cardiac myosin binding protein in the subject, preferably in the myocardium of said subject.

[0011] In one aspect, the embodiments described herein provide a vector construct comprising a nucleic acid sequence that encodes a functional cMyBP-C protein. In one or more embodiments, the functional cMyBP-C protein comprises an amino acid sequence at least 90%, 95% or 98% identical to the amino acid sequence of SEQ ID NO: 2 (a human cardiac myosin binding protein C). In some embodiments, the functional cMyBP-C protein comprises an amino acid sequence at least 95% identical to the amino acid sequence of SEQ ID NO: 2. In example embodiments, the nucleic acid sequence encoding the functional cardiac myosin binding protein C is a wild-type sequence, of which SEQ ID NOs: 1, 42 and 43 are examples, or is codon optimized, or is a variant. Alternative codon optimized or variant human cardiac myosin binding protein C-encoding sequences are set out as SEQ ID NOs: 44-46. The coding sequence for cardiac myosin binding protein C (cMyBP-C) is, in some embodiments, codon optimized for expression in humans. In some embodiments, the nucleic acid sequence encoding the functional cMyBP-C is at least 85%, 90%, 95%, 96%, 97%, 98%, or 99% identical to any one of SEQ ID NOs: 1 or 42-46.

[0012] The protein to be expressed may also be a functional variant which exhibits a significant amino acid sequence identity (i.e., at least 60%, 65%, 70%, 75%, 80%, 85%, 90%, 95%, 96%, 97%, 98%, or 99%) compared to SEQ ID NO: 2. In this context, the term “functional variant” means that the variant of the cMyBP-C protein is capable of fulfilling the function of the naturally occurring cMyBP-C protein, e.g., providing structural and/or functional support to the sarcomere to restore normal myocardial contractility, and optionally is capable of suppressing expression of and/or reducing levels of, mutant cMyBP-C proteins or other mutant sarcomeric proteins.

[0013] Functional variants of a cMyBP-C protein may include, for example, proteins which differ from their naturally occurring counterparts by one or more amino acid substitutions, deletions or additions. For example, a variant protein of the human cMyBP-C protein of SEQ ID NO: 2 may have an amino acid sequence with at least 2, 3, 4, 5, 6, 10, or more, and/or up to 10, 20, 30 or more positions which have been substituted by another amino acid relative to SEQ ID NO: 2. As another example, a variant protein of the human cMyBP-C protein of SEQ ID NO: 2 may be truncated version of the human cMyBP-C protein. For example, the functional variant may be selected from the group consisting of the naturally occurring MYBPC3 splice variant lacking exons 5 and 6, termed variant 4 (as shown in SEQ ID NO: 46).

[0014] In one or more embodiments, the nucleic acid sequence encoding cMyBP-C is operably linked to one or more heterologous expression control elements. Preferably, expression of the cMyBP-C-encoding transgene is controlled by at least one cardiomyocyte-specific expression control element. Thus, in such embodiments, in the vector constructs described herein, the nucleic acid sequence encoding cMyBP-C is operably linked to a heterologous cardiomyocyte-specific transcription regulatory region. In some embodiments, in the vector constructs described herein, the expression control elements include one or more of the following: a promoter and/or enhancer; optionally an intron; optionally an exon; and a polyadenylation (polyA) signal. Such elements are further described herein.

[0015] The cardiomyocyte-specific transcription regulatory region may comprise one or more cardiomyocyte-specific expression control elements, such as a cardiomyocyte-specific promoter. Preferably the cardiomyocyte-specific promoter comprises at least a fragment or variant of the human cardiac troponin T (hTNNT2) promoter.

[0016] In some embodiments, the cardiomyocyte-specific promoter comprises a nucleic acid sequence at least, or more than, 80%, 85%, 90%, 95%, 97%, 98% or 99% identical to SEQ ID NO: 47 (over the full length of SEQ ID NO: 47). In some embodiments, the cardiomyocyte-specific promoter may be combined with an intron that enhances expression of the cMyBP-C protein, located 5′ to the cMyBP-C coding sequence. For example, the vector construct and/or AAV particle comprise, in 5′ to 3′ orientation, a cardiomyocyte-specific promoter, an intron that enhances expression of cMyBP-C protein, and a nucleotide sequence encoding cMyBP-C coding sequence. In some embodiments, the vector construct and/or AAV particle comprise (a) a cardiomyocyte-specific promoter comprising a nucleotide sequence at least 80% identical to any one of (i) SEQ ID NO: 47, (ii) SEQ ID NO: 48, (iii) SEQ ID NO: 49, (iv) SEQ ID NO: 50, (v) SEQ ID NO: 51, or (vi) SEQ ID NO: 52, (b) an intron comprising a nucleotide sequence at least 60% identical to SEQ ID NO: 53, located 5′ to the cMyBP-C coding sequence, a nucleotide sequence encoding cMyBP-C, and optionally a polyadenylation signal sequence. Alternatively, the intron comprises a nucleotide sequence at least 60% identical to SEQ ID NO: 56 or SEQ ID NO: 58.

[0017] In other embodiments, the cardiomyocyte-specific promoter may be combined with an intron that enhances expression of the cMyBP-C protein, located within the cMyBP-C coding sequence. In some embodiments, the intron sequence is located within the nucleotide sequence encoding cMyBP-C, for example, between any of the exons, e.g., between exon 2 and 3. In some embodiments, the intron is located at position 293 of any one of SEQ ID NO: 1 or 42-45.

[0018] In some embodiments, the vector construct and/or resulting AAV particle comprise a cardiomyocyte-specific promoter sequence that is a fragment or variant of the hTNNT2 promoter that is more than 420 and less than 544 nucleotides in length and that comprises a nucleic acid sequence at least 90% identical to SEQ ID NO: 47. In any of the embodiments described herein, the cardiomyocyte-specific promoter optionally excludes any one of SEQ ID NO: 1 to 85 of U.S. Pat. Pub. No. 2021/0252165.

[0019] For example, the cardiomyocyte-specific promoter sequence comprises a nucleic acid sequence at least, or more than, 80%, 85%, 90%, 95%, 97%, 98% or 99% identical to any of (i) SEQ ID NO: 47 or fragment thereof, (ii) SEQ ID NO: 48 or fragment thereof, (iii) SEQ ID NO: 49 or a fragment thereof, (iv) SEQ ID NO: 50 or a fragment thereof, (v) SEQ ID NO: 51 or a fragment thereof, or (vi) SEQ ID NO: 52 or a fragment thereof. In an example embodiment, the sequence of the cardiomyocyte-specific promoter comprises a nucleotide sequence at least 96%, 97%, 98%, or 99% identical to SEQ ID NO: 51. In some example embodiments, the sequence of the hTNNT promoter comprises at least nucleotides 1-106 and 507-532 of SEQ ID NO: 51, or at least nucleotides 507-532 of SEQ ID NO: 51, or at least nucleotides 521-532 of SEQ ID NO: 51.

[0020] In some embodiments, the vector construct comprises one or more introns that enhance expression of the cMyBP-C-encoding nucleic acid, e.g., such that increased levels are detectable in the myocardium or heart. In some embodiments, the intron comprises a globin intron, and/or a fragment or variant thereof or a chimeric intron, and/or a fragment or variant thereof. In one or more embodiments, the intron comprises a nucleotide sequence at least 60%, 65%, 70%, 75%, 80%, 85%, 90%, 95%, 97%, 98% or 99% identical to SEQ ID NO: 53. In one or more embodiments, the intron comprises a nucleotide sequence at least 60%, 65%, 70%, 75%, 80%, 85%, 90%, 95%, 97%, 98% or 99% identical to SEQ ID NO: 56. In one or more embodiments, the intron comprises a nucleotide sequence at least 60%, 65%, 70%, 75%, 80%, 85%, 90%, 95%, 97%, 98% or 99% identical to SEQ ID NO: 58. In some embodiments, the intron is inserted downstream from the promotor and 5′ to the cMyBP-C coding sequence. In some embodiments, the intron is located within the nucleotide sequence encoding cMyBP-C, for example between any of the exons, e.g., between exon 2 and 3. In example embodiments, the intron is inserted at nucleotides position 293 of the MYBPC3 wild-type cDNA sequence of SEQ ID NO: 1. In further example embodiments, the intron is inserted at nucleotides position 293 of the MYBPC3 wild-type cDNA sequence of any one of SEQ ID NOs: 42-45.

[0021] In some embodiments, the vector construct may further comprise an exon sequence or fragment thereof, preferably adjacent to an intron sequence, e.g., a globin intron adjacent to the 3′ end of a fragment of beta globin exon 3 (SEQ ID NO: 54). The cardiomyocyte-specific transcription regulatory region can comprise a combination of the intron and exon fragment, for example, SEQ ID NO: 55. In some example embodiments, the cardiomyocyte-specific transcription regulatory region comprises SEQ ID NO: 56.

[0022] In some embodiments, the vector construct comprises a polyadenylation signal, optionally a bovine growth hormone (bGH) polyA signal (e.g., SEQ ID NO: 59, 60, or 61) or fragment thereof, optionally a human growth hormone (hGH) polyA signal (e.g., SEQ ID NO: 62) or fragment thereof, optionally an SV40 polyA signal (e.g., SEQ ID NO: 63) or fragment thereof, optionally a Proudfoot synthetic polyA signal (e.g., SEQ ID NO: 65) or fragment thereof, or optionally a rabbit beta-globin polyA signal (e.g., SEQ ID NO: 66) or fragment thereof. In some embodiments, the polyA signal comprises a nucleotide sequence at least 90% identical to SEQ ID NO: 64. In some embodiments, the polyA signal comprises a nucleotide sequence at least 90% identical to SEQ ID NO: 59, for example, comprises SEQ ID NO: 60 or a fragment thereof, or SEQ ID NO: 61 or a fragment thereof. In example embodiments, the polyA signal is a fragment of SEQ ID NO: 62 is about 100 to about 500 nucleotides in length, or about 150 to about 400 nucleotides in length, or about 200 to about 300 nucleotides in length, or about 200 to about 250 nucleotides in length, that comprises SEQ ID NO 59.

[0023] In some embodiments, the vector construct comprises a nucleotide sequence at least 97%, 98% or 99% identical to any of SEQ ID NO: 3-41. In other embodiments, the vector construct comprises a nucleotide sequence at least 97%, 98% or 99% identical to a nucleotide sequence that is complementary to or is a negative (−) strand of any of SEQ ID NO: 3-41 or 92-169.

[0024] In some embodiments, the vector construct comprises a nucleotide sequence at least 97%, 98% or 99% identical to any of SEQ ID NO: 3, 6, 9, 12, 15, 18, 21, 24, 27, 30, 33, 36, or 39. In other embodiments, the vector construct comprises a nucleotide sequence at least 97%, 98% or 99% identical to a nucleotide sequence that is complementary to or is a negative (−) strand of any of SEQ ID NO: 3, 6, 9, 12, 15, 18, 21, 24, 27, 30, 33, 36, or 39.

[0025] In some embodiments, the vector construct comprises a nucleotide sequence at least 97%, 98% or 99% identical to any of SEQ ID NO: 4, 7, 10, 13, 16, 19, 22, 25, 28, 31, 34, 37, or 40. In other embodiments, the vector construct comprises a nucleotide sequence at least 97%, 98% or 99% identical to a nucleotide sequence that is complementary to or is a negative (−) strand of any of SEQ ID NO: 4, 7, 10, 13, 16, 19, 22, 25, 28, 31, 34, 37, or 40.

[0026] In some embodiments, the vector construct comprises a nucleotide sequence at least 97%, 98% or 99% identical to any of SEQ ID NO: 5, 8, 11, 14, 17, 20, 23, 26, 29, 32, 35, 38, or 41. In other embodiments, the vector construct comprises a nucleotide sequence at least 97%, 98% or 99% identical to a nucleotide sequence that is complementary to or is a negative (−) strand ofany of 5, 8, 11, 14, 17, 20, 23, 26, 29, 32, 35, 38, or 41.

[0027] Example embodiments include the following:

[0028] Construct C1 is 4950 bp in length (SEQ ID NO: 29) and comprises the following elements in 5′ to 3′: 5′ AAV2-ITR (130 bp) (SEQ ID NO: 67), hTNNT2 promoter (544 bp) (SEQ ID NO: 52), chimeric intron (133 bp) (SEQ ID NO: 58), codon optimized hMYBPC3 (SEQ ID NO: 44), mini poly A (57 bp) (SEQ ID NO: 64) and 3′ AAV2 ITR (130 bp) (SEQ ID NO: 71). In further embodiments, Construct C1 optionally comprises any of the 5′ AAV2-ITR sequences of SEQ ID NO: 67-70 (or the complement thereof) and/or any of the 3′ AAV2-ITR sequences of SEQ ID NO: 71-74 (or the complement thereof), or fragments thereof.

[0029] Construct C2 is 4801 bp in length (SEQ ID NO: 32) and comprises the following elements in 5′ to 3′: 5′ AAV2-ITR (130 bp) (SEQ ID NO: 67), hTNNT2 promoter (544 bp) (SEQ ID NO: 52), codon optimized hMYBPC3 (SEQ ID NO: 44), mini poly A (57 bp) (SEQ ID NO: 64) and 3′ AAV2 ITR (130 bp) (SEQ ID NO: 71). In further embodiments, Construct C2 optionally comprises any of the 5′ AAV2-ITR sequences of SEQ ID NO: 67-70 (or the complement thereof) and/or any of the 3′ AAV2-ITR sequences of SEQ ID NO: 71-74 (or the complement thereof), or fragments thereof.

[0030] Construct C3 is 4801 bp in length (SEQ ID NO: 35) and comprises the following elements in 5′ to 3′: 5′ AAV2-ITR (130 bp) (SEQ ID NO: 67), hTNNT2 promoter (544 bp) (SEQ ID NO: 52), wild type hMYBPC3 (SEQ ID NO: 43), mini poly A (57 bp) (SEQ ID NO: 64) and 3′ AAV2 ITR (130 bp) (SEQ ID NO: 71). In further embodiments, Construct C3 optionally comprises any of the 5′ AAV2-ITR sequences of SEQ ID NO: 67-70 (or the complement thereof) and/or any of the 3′ AAV2-ITR sequences of SEQ ID NO: 71-74 (or the complement thereof), or fragments thereof.

[0031] Construct C4 is 4950 bp in length (SEQ ID NO: 38) and comprises the following elements in 5′ to 3′: 5′ AAV2-ITR (130 bp) (SEQ ID NO: 67), hTNNT2 promoter (544 bp) (SEQ ID NO: 52), chimeric intron (133 bp) (SEQ ID NO: 58), wild type hMYBPC3 (SEQ ID NO: 43), mini poly A (57 bp) (SEQ ID NO: 64) and 3′ AAV2 ITR (130 bp) (SEQ ID NO: 71). In further embodiments, Construct C4 optionally comprises any of the 5′ AAV2-ITR sequences of SEQ ID NO: 67-70 (or the complement thereof) and/or any of the 3′ AAV2-ITR sequences of SEQ ID NO: 71-74 (or the complement thereof), or fragments thereof.

[0032] Construct C5 is 4950 bp in length (SEQ ID NO: 41) and comprises the following elements in 5′ to 3′: 5′ AAV2-ITR (130 bp) (SEQ ID NO: 67), hTNNT2 promoter (544 bp) (SEQ ID NO: 52), chimeric intron (133 bp) (SEQ ID NO: 58), CpG free hMYBPC3 (SEQ ID NO: 45), mini poly A (57 bp) (SEQ ID NO: 64) and 3′ AAV2 ITR (130 bp) (SEQ ID NO: 71). In further embodiments, Construct C5 optionally comprises any of the 5′ AAV2-ITR sequences of SEQ ID NO: 67-70 (or the complement thereof) and/or any of the 3′ AAV2-ITR sequences of SEQ ID NO: 71-74 (or the complement thereof), or fragments thereof.

[0033] Construct A1 is 5074 bp in length (SEQ ID NO: 5) and comprises the following elements in 5′ to 3′: 5′ AAV2-ITR (130 bp) (SEQ ID NO: 67), hTNNT2 promoter (532 bp) (SEQ ID NO: 51), globin intron (131 bp) (SEQ ID NO: 53), HBB exon 3 (SEQ ID NO: 54); wild type hMYBPC3 (SEQ ID NO: 42), bGH poly A (227 bp) (SEQ ID NO: 61) and 3′ AAV2 ITR (130 bp) (SEQ ID NO: 71). In further embodiments, Construct A1 optionally comprises any of the 5′ AAV2-ITR sequences of SEQ ID NO: 67-70 (or the complement thereof) and/or any of the 3′ AAV2-ITR sequences of SEQ ID NO: 71-74 (or the complement thereof), or fragments thereof.

[0034] Construct A2 is 4939 bp in length (SEQ ID NO: 8) and comprises the following elements in 5′ to 3′: 5′ AAV2-ITR (130 bp) (SEQ ID NO: 67), hTNNT2 promoter (469 bp) (SEQ ID NO: 49), wild type hMYBPC3 (SEQ ID NO: 42) with globin intron (131 bp) (SEQ ID NO: 53) between exons, bGH poly A (227 bp) (SEQ ID NO: 61) and 3′ AAV2 ITR (130 bp) (SEQ ID NO: 71). In further embodiments, Construct A2 optionally comprises any of the 5′ AAV2-ITR sequences of SEQ ID NO: 67-70 (or the complement thereof) and/or any of the 3′ AAV2-ITR sequences of SEQ ID NO: 71-74 (or the complement thereof), or fragments thereof.

[0035] Construct A3 is 4939 bp in length (SEQ ID NO: 11) and comprises the following elements in 5′ to 3′: 5′ AAV2-ITR (130 bp) (SEQ ID NO: 67), hTNNT2 promoter (532 bp) (SEQ ID NO: 51), wild type hMYBPC3 (SEQ ID NO: 42) with globin intron (131 bp) (SEQ ID NO: 53) between exons, bGH poly A (169 bp) (SEQ ID NO: 59) and 3′ AAV2 ITR (130 bp) (SEQ ID NO: 71). In further embodiments, Construct A3 optionally comprises any of the 5′ AAV2-ITR sequences of SEQ ID NO: 67-70 (or the complement thereof) and/or any of the 3′ AAV2-ITR sequences of SEQ ID NO: 71-74 (or the complement thereof), or fragments thereof.

[0036] Construct A4 is 4939 bp in length (SEQ ID NO: 14) and comprises the following elements in 5′ to 3′: 5′ AAV2-ITR (130 bp) (SEQ ID NO: 67), hTNNT2 promoter (499 bp) (SEQ ID NO: 50), wild type hMYBPC3 (SEQ ID NO: 42) with globin intron (131 bp) (SEQ ID NO: 53) between exons, bGH poly A (202 bp) (SEQ ID NO: 60) and 3′ AAV2 ITR (130 bp) (SEQ ID NO: 71). In further embodiments, Construct A4 optionally comprises any of the 5′ AAV2-ITR sequences of SEQ ID NO: 67-70 (or the complement thereof) and/or any of the 3′ AAV2-ITR sequences of SEQ ID NO: 71-74 (or the complement thereof), or fragments thereof.

[0037] Construct A5 is 4871 bp in length (SEQ ID NO: 17) and comprises the following elements in 5′ to 3′: 5′ AAV2-ITR (130 bp) (SEQ ID NO: 67), hTNNT2 promoter (532 bp) (SEQ ID NO: 51), wild type hMYBPC3 (SEQ ID NO: 42), bGH poly A (227 bp) (SEQ ID NO: 61) and 3′ AAV2 ITR (130 bp) (SEQ ID NO: 71). In further embodiments, Construct A5 optionally comprises any of the 5′ AAV2-ITR sequences of SEQ ID NO: 67-70 (or the complement thereof) and/or any of the 3′ AAV2-ITR sequences of SEQ ID NO: 71-74 (or the complement thereof), or fragments thereof.

[0038] Construct A6 is 5002 bp in length (SEQ ID NO: 20) and comprises the following elements in 5′ to 3′: 5′ AAV2-ITR (130 bp) (SEQ ID NO: 67), hTNNT2 promoter (532 bp) (SEQ ID NO: 51), wild type hMYBPC3 (SEQ ID NO: 42) with globin intron (131 bp) (SEQ ID NO: 53) between exons, bGH poly A (227 bp) (SEQ ID NO: 61) and 3′ AAV2 ITR (130 bp) (SEQ ID NO: 71). In further embodiments, Construct A6 optionally comprises any of the 5′ AAV2-ITR sequences of SEQ ID NO: 67-70 (or the complement thereof) and/or any of the 3′ AAV2-ITR sequences of SEQ ID NO: 71-74 (or the complement thereof), or fragments thereof.

[0039] Construct A7 is 4781 bp in length (SEQ ID NO: 23) and comprises the following elements in 5′ to 3′: 5′ AAV2-ITR (130 bp) (SEQ ID NO: 67), hTNNT2 promoter (469 bp) (SEQ ID NO: 49), Kozac sequence, wild type hMYBPC3 (SEQ ID NO: 42) with globin intron (131 bp) (SEQ ID NO: 53) between exons, mini poly A (57 bp) (SEQ ID NO: 64), 3′-UTR sequence and 3′ AAV2-ITR (130 bp) (SEQ ID NO: 71). In further embodiments, Construct A7 optionally comprises any of the 5′ AAV2-ITR sequences of SEQ ID NO: 67-70 (or the complement thereof) and/or any of the 3′ AAV2-ITR sequences of SEQ ID NO: 71-74 (or the complement thereof), or fragments thereof.

[0040] Construct A8 is 4844 bp in length (SEQ ID NO: 26) and comprises the following elements in 5′ to 3′: 5′ AAV2-ITR (130 bp) (SEQ ID NO: 67), hTNNT2 promoter (532 bp) (SEQ ID NO: 51), Kozac sequence, wild type hMYBPC3 (SEQ ID NO: 42) with globin intron (131 bp) (SEQ ID NO: 53) between exons, mini poly A (57 bp) (SEQ ID NO: 64), 3′-UTR sequence and 3′ AAV2-ITR (130 bp) (SEQ ID NO: 71). In further embodiments, Construct A8 optionally comprises any of the 5′ AAV2-ITR sequences of SEQ ID NO: 67-70 (or the complement thereof) and/or any of the 3′ AAV2-ITR sequences of SEQ ID NO: 71-74 (or the complement thereof), or fragments thereof.

[0041] In any of the foregoing embodiments, the vector construct comprises at least one ITR sequence. Example ITR sequences include but are not limited to SEQ ID NOs: 67-74 including any complementary sequences and/or combinations thereof.

[0042] In any of the foregoing embodiments, the length of the vector insert beginning at one ITR and ending with the second ITR is between about 4 kb to about 5.5 kb in size. In one or more embodiments, the vector construct is an AAV vector genome about 4 kb to about 5.4 kb in size, about 4.5 kb to about 5.5 kb in size, or about 4.8 kb to about 5.2 kb in size, or about 4.5 kb to about 5 kb in size.

[0043] The vector construct is preferably a recombinant AAV vector construct. In some embodiments, the vector construct comprises (a) one or both of (i) an AAV 5′ inverted terminal repeat (ITR) and (ii) an AAV 3′ ITR; (b) a promoter and/or enhancer, e.g., a cardiomyocyte-specific transcription regulatory region; and (c) a nucleic acid sequence encoding a functionally active human cMyBP-C protein. In some embodiments, the vector construct comprises (a) an AAV 5′ inverted terminal repeat (ITR) sequence; (b) a promoter and/or enhancer, e.g., a cardiomyocyte-specific transcription regulatory region; (c) a nucleic acid sequence encoding a functionally active human cMyBP-C protein; (d) an intron; (e) a polyadenylation signal; and (f) an AAV 3′ ITR. In some embodiments, the intron is downstream of the promoter and positioned 5′ to the cMyBP-C coding sequence, while in other embodiments, the intron is located between exons of the cMyBP-C coding sequence, e.g., between exon 2 and exon 3. In further embodiments, the vector construct comprises (a) an AAV′ 5′ inverted terminal repeat (ITR) sequence; (b) a promoter and/or enhancer, e.g., a cardiomyocyte-specific transcription regulatory region; (c) a nucleic acid sequence encoding a functionally active human cMyBP-C protein; (d) an intron; (e) and exon; (f) a polyadenylation signal; and (g) an AAV 3′ ITR. The AAV 5′ ITR and/or AAV 3′ ITR may be from a heterologous AAV pseudotype (which may or may not be modified as known in the art). In some embodiments, the 5′ ITR and 3′ ITR sequences are derived from AAV2 (e.g., SEQ ID NO: 67-70 and 71-74, respectively).

[0044] In any of the foregoing embodiments, the vector construct comprises a nucleotide sequence at least 80%, 81%, 82%, 83%, 84%, 85%, 86%, 87%, 88%, 89%, 90%, 91%, 92%, 93%, 94%, 95%, 96%, 96.5%, 97%, 97.5%, 98%, 98.5%, 99%, or 99.5% identical to any of SEQ ID NOs: 3-42 and 92-169 over the length of SEQ ID NOs: 3-42 and 92-169, respectively. In some embodiments, the vector construct is at least 97%, 98% or 99% identical to any of SEQ ID NOs: 3-42 and 92-169 over the length of SEQ ID NOs: 3-42 and 92-169, respectively. In specific examples, the vector construct comprises a nucleotide sequence at least 85% identical to any of SEQ ID NOs: 29, 32, or 41, or at least 95% identical to any of SEQ ID NOs: 35 or 38. In other examples, the vector construct comprises a nucleotide sequence at least 90% identical to any of SEQ ID NOs: 29, 32, or 41, or at least 98% identical to any of SEQ ID NOs: 35 or 38. Such vectors, for example, preferably comprise flanking ITRs, a nucleic acid sequence encoding a functionally active human cMyBP-C protein coding sequence, a cardiomyocyte-specific regulatory region, an intron, and a polyA signal.

[0045] In another aspect, provided herein is a recombinant adeno-associated virus (rAAV) particle comprising an AAV capsid and the vector construct as described in one or more of the embodiments herein. Any AAV capsids, e.g., AAV1-13, may be used. In some embodiments, the recombinant AAV (rAAV) particle used for delivering the cMyBP-C-encoding gene has cardiac tropism. In such embodiments, the rAAV comprises an AAV capsid with cardiac tropism, for example, an AAV9-type capsid at least 85%, 90% or 95% identical to SEQ ID NO: 75, or an AAV1-type, AAV6-type or AAV7-type capsid, or a variant of any of these, that exhibits cardiac tropism. In one or more embodiments, the AAV capsid is a capsid for which preexisting humoral immunity is reduced compared to AAV9, e.g., when evaluated by IVIG neutralization in vitro.

[0046] In another aspect, provided herein are methods for the production of an AAV particle, useful as a gene delivery vector, the method comprising the steps of: (1) providing a cell (e.g., a mammalian cell) one or more nucleic acid constructs (a) comprising a vector construct as described herein comprising a nucleic acid encoding cMyBP-C as described herein that is flanked by two AAV ITR nucleotide sequences; (b) a nucleotide sequence encoding one or more AAV Rep proteins which is operably linked to a promoter that is capable of driving expression of the Rep protein(s); (c) a nucleotide sequence encoding one or more AAV capsid proteins which is operably linked to a promoter that is capable of driving expression of the capsid protein(s); and (d) optionally genes encoding AAP and MAAP contained in the VP2/3; (2) culturing the cell defined in (1) under conditions conducive to the expression of the Rep and the capsid proteins; and, optionally (3) recovering the AAV particle. In some embodiments, the cell is a mammalian cell. In some embodiments, the mammalian cell is a HEK293 cell. Also provided herein are a population of rAAV particles produced by such methods.

[0047] In yet another aspect, provided herein are pharmaceutical compositions comprising the vector construct described herein or the rAAV particle or population of rAAV particles described herein, and a sterile pharmaceutically acceptable diluent, excipient or carrier.

[0048] In a further aspect, provided herein are methods of delivering a MYBPC3 gene to a mammalian subject. Such methods include methods of expressing myosin binding protein C in a mammalian subject comprising administering to the subject a composition comprising the vector construct described herein, the rAAV particle described herein, or the pharmaceutical composition described herein, thereby expressing the encoded myosin binding protein in the subject. Preferably, in such methods, the mammal is a human and the myosin binding protein C is functional human myosin binding protein C as described herein. Such methods include a method of expressing myosin binding protein C in cells of the myocardium of a mammal by administering an amount of the vector construct, rAAV particle or pharmaceutical composition effective to increase the level of myosin binding protein C expression in the myocardium of the mammal. Such methods also include a method of increasing the level of functional myosin binding protein C in the heart tissue (e.g., myocardiocytes) of a mammal by administering an amount of the vector construct, rAAV particle or pharmaceutical composition effective to increase the level of functional myosin binding protein C in the heart tissue (e.g., myocardiocytes) of a mammal. Such methods also include a method of treating a deficiency in functional wild type myosin binding protein C in a mammal by administering an amount of the vector construct, rAAV particle or pharmaceutical composition effective to increase the level of functional myosin binding protein C in the heart tissue (e.g., myocardiocytes) of a mammal. In some embodiments, the amount of the vector construct, rAAV particle or pharmaceutical composition is effective to increase the level of myosin binding protein C in heart tissue (e.g., myocardiocytes) by at least about 2-fold; and/or to restore contractile force, relative tension, calcium-activated tension, relaxation time, in engineered heart tissue in vitro or in animal tissue in vivo.

[0049] Such methods also include a method of treating HCM in a mammal, or treating or preventing any symptom thereof, comprising administering a therapeutically effective amount of the vector construct, rAAV particle or pharmaceutical composition. In one or more embodiments, such methods increase levels of cMyBP-C expression in the heart, by at least 50%, at least 60%, at least 70%, at least 80%, at least 90%, at least 95%, or at least 98% compared to the levels without treatment, or to the levels seen in healthy humans. Such methods, for example, reduce heart size, reduce cardiothoracic ratio, reduce end diastolic or end systolic left ventricular diameter, reduce anterior or posterior wall thickness, increase ejection time, increase aortic peak flow velocity or aortic flow time, and/or decrease symptoms of disease. In one or more embodiments, such methods reduce the frequency or severity of symptoms such as heart failure, arrhythmias, chest pain, shortness of breath, fatigue and dizziness.

[0050] In any of the methods described herein, the rAAV particle is delivered at a dose of about 1e12 to 6e14 vg/kg in an aqueous suspension. In any of the methods described herein, the administration of the vector construct, rAAV particle, or pharmaceutical composition may further comprise administration of prophylactic or therapeutic corticosteroid treatment, and/or may further include administration of a second therapy for treating HCM. In any of the methods herein, prior to administration of an AAV particle to a patient as described above, the prospective patient may be assessed for the presence of anti-AAV capsid antibodies or anti-AAV neutralizing antibodies that are capable of blocking cell transduction or otherwise reduce the overall efficiency of the treatment.

[0051] Other embodiments will be evident to one skilled in the art upon reading the present specification.

### BRIEF DESCRIPTION OF THE DRAWINGS

[0052] FIG. 1 depicts the organization of the elements of AAV particles comprising vectors denoted C1-C5 and A1-A6 herein.

[0053] FIG. 2 depicts the fold change of cMyBP-C protein as detected by Western blot in whole protein lysates of engineered heart tissue for vectors denoted C1-C5 and A1-A6 herein.

[0054] FIG. 3 depicts normalized force of contraction of myocytes in engineered heart tissue treated with AAV particles comprising vectors denoted C2, C3, and A2-A6 herein.

[0055] FIGS. 4A-4C depict relaxation time after contraction of myocytes in engineered heart tissue treated with AAV particles comprising vectors denoted C2, C3 and A1-A6 herein. FIG. 4A shows relative percentage of late relaxation time. FIG. 4B shows time to 20% relaxation in seconds, FIG. 4C shows time to 80% relaxation in seconds, and FIG. 4D depicts normalization of force % for Constructs A3 and A6 produced in HEK293 cells (Group 3) and insect cells (Group 4).

[0056] FIGS. 5A-5C depict DNA copy number (vector genomes), RNA copy number, and cMyBP-C protein (ug/gram of heart tissue) in mice, respectively, administered AAV particles comprising vectors denoted C1-C5 and A1-A6 herein.

[0057] FIG. 6 depicts the percentage of cardiomyocytes in heart tissue that express human cMyBP-C, from mice administered AAV particles comprising vectors denoted C3, A5 and A6 herein.

### DETAILED DESCRIPTION

[0058] Provided herein are nucleic acids or vector constructs encoding functionally active therapeutic cMyBP-C protein, AAV vector genomes and replication deficient rAAV particles comprising such vector constructs, and pharmaceutical compositions comprising such vector constructs, vector genomes and AAV particles. The compositions and methods of the invention may provide improved AAV virus production yield and/or simplified purification and/or enhanced expression of cMyBP-C protein in the heart, particularly in cells of the myocardium (cardiomyocytes). Also provided herein are methods of making the vector constructs, AAV vector genomes and replication deficient rAAV particles comprising such vector constructs. Further provided herein are methods of treating a deficiency in functional wild-type cMyBP-C, including HCM.

[0059] In another embodiment, provided are methods of producing recombinant adeno-associated virus (AAV) particles comprising any of the AAV vector constructs provided herein. The methods comprise the steps of culturing a cell that has been transfected with any of the AAV vector constructs provided herein (in association with various AAV cap and rep genes) and recovering recombinant therapeutic AAV particles from the transfected cell or supernatant of the transfected cell culture.

[0060] The cells useful for recombinant AAV production provided herein are any cell type susceptible to baculovirus infection, including insect cells such as High Five, Sf9, Se301, SeIZD2109, SeUCR1, Sf9, Sf900+, Sf21, BTI-TN-5B1-4, MG-1, Tn368, HzAm1, BM-N, Ha2302, Hz2E5, and Ao38. In another embodiment, mammalian cells such as HEK293, HeLa, CHO, NSO, SP2/0, PER.C6, Vero, RD, BHK, HT 1080, A549, Cos-7, ARPE-19, and MRC-5 can be used.

[0061] In another embodiment, provided herein is the use of an effective amount of vector nucleic acid, vector construct, or AAV particle for the preparation of a medicament for the treatment of a subject suffering from HCM or deficiency in functional wild-type cMyBP-C protein. In one embodiment, the subject suffering from HCM is a human. In one embodiment, the medicament is administered by intravenous (IV) administration. In another embodiment, administration of the medicament results in increased levels of functional cMyBP-C in the cells of the myocardium to ameliorate HCM symptoms. In certain embodiments, the medicament is also for co-administration with a prophylactic and/or therapeutic corticosteroid for the prevention and/or treatment of any toxicity associated with administration of the AAV particle. The prophylactic or therapeutic corticosteroid treatment may comprise at least 5, 10, 15, 20, 25, 30, 35, 40, 45, 50, 55, 60, or more mg/day of the corticosteroid. In certain embodiments, the prophylactic or therapeutic corticosteroid may be administered over a continuous period of at least about 3, 4, 5, 6, 7, 8, 9, 10 weeks, or more.

[0062] In another embodiment, the hypertrophic cardiomyopathy therapy provided herein optionally further includes administration, e.g., concurrent administration, of other therapies that are used to treat HCM.

### Definitions

[0063] Unless defined otherwise, technical and scientific terms used herein have the same meaning as commonly understood by one of ordinary skill in the art to which the present disclosure belongs. See, e.g., Singleton et al., Dictionary of Microbiology and Molecular Biology 2^{nd} ed., J. Wiley & Sons (New York, N.Y. 1994); Sambrook et al., Molecular Cloning, A Laboratory Manual, Cold Springs Harbor Press (Cold Springs Harbor, N.Y. 1989). For purposes of the present disclosure, the following terms are defined below.

[0064] As used herein, in the context of gene delivery, the term “vector” or “gene delivery vector” may refer to a particle that functions as a gene delivery vehicle, and which comprises nucleic acid (i.e., the vector genome comprising any of the vector constructs described herein) packaged within, for example, an envelope or capsid. A gene delivery vector may be a viral gene delivery vector or a non-viral gene delivery vector. Alternatively, in some contexts, the term “vector” may be used to refer only to the vector genome or vector construct. Viral vectors suitable for use herein may be a parvovirus, an adenovirus, a retrovirus, a lentivirus or a herpes simplex virus. The parvovirus may be an adenovirus-associated virus (AAV).

[0065] As used herein, the term “AAV” is a standard abbreviation for adeno-associated virus. Adeno-associated virus is a single-stranded DNA parvovirus that grows only in cells in which certain functions are provided by a co-infecting helper virus. There are numerous serotypes of AAV that have been characterized. General information and reviews of AAV can be found in, for example, Carter, Handbook of Parvoviruses, Vol. 1, pp. 169-228 (1989); and Berns, Virology, pp. 1743-64, Raven Press, (New York) (1990); Gao et al., Meth. Mol. Biol. 807: 93-118 (2011); Ojala et al., Mol. Ther. 26(1): 304-19 (2018). However, it is fully expected that these same principles will be applicable to additional AAV serotypes since it is well known that the various serotypes are quite closely related, both structurally and functionally, even at the genetic level. (See, e.g., Blacklowe, 1988, pp. 165-174 of Parvoviruses and Human Disease, J. R. Pattison, ed.; and Rose, Comprehensive Virology 3:1-61 (1974)). For example, all AAV serotypes apparently exhibit very similar replication properties mediated by homologous rep genes; and all bear three related capsid proteins. The degree of relatedness is further suggested by heteroduplex analysis which reveals extensive cross-hybridization between serotypes along the length of the genome; and the presence of analogous self-annealing segments at the termini that correspond to “inverted terminal repeat sequences” (ITRs).

[0066] As used herein, an “AAV vector construct” refers to nucleic acids, either single-stranded or double-stranded, having at least one of (i) an AAV 5′ inverted terminal repeat (ITR) sequence and (ii) an AAV 3′ ITR, flanking a protein-coding sequence (in one embodiment, a functional therapeutic protein-encoding sequence, e.g., cMyBP-C-encoding sequence) operably linked to transcription regulatory elements (also called “expression control elements”) that are heterologous to protein-encoding sequence and/or heterologous to the AAV viral genome, i.e., one or more promoters and/or enhancers and, optionally, a polyadenylation sequence and/or optionally one or more introns. A single-stranded AAV vector refers to nucleic acids that are present in the genome of an AAV virus particle, and can be either the sense strand or the anti-sense strand of the nucleic acid sequences disclosed herein. The size of such single-stranded nucleic acids is provided in bases. A double-stranded AAV vector refers to nucleic acids that are present in the DNA of plasmids, e.g., pUC19, or genome of a double-stranded virus, e.g., baculovirus, used to express or transfer the AAV vector nucleic acids. The size of such double-stranded nucleic acids in provided in base pairs (bp).

[0067] The AAV vector constructs provided herein in single strand form are less than about 7.0 kb in length, or are less than 6.5 kb in length, or are less than 6.4 kb in length, or are less than 6.3 kb in length, or are less than 6.2 kb in length, or are less than 6.0 kb in length, or are less than 5.8 kb in length, or are less than 5.6 kb in length, or are less than 5.5 kb in length, or are less than 5.4 kb in length, or are less than 5.3 kb in length, or are less than 5.2 kb in length. The AAV vector constructs in single strand form are also at least about 4.0 kb in length. Preferably, the AAV vector constructs are also at least about 4.5 kb in length. In some embodiments, the AAV vector constructs provided herein in single strand form range from about 4.0 kb to about 5.8 kb in length.

[0068] While AAV particles have been reported in the literature having AAV genomes of >5.0 kb, in many of these cases the 5′ or 3′ ends of the encoded genes appear to be truncated (see Hirsch et al., Molec. Ther. 18: 6-8 (2010), and Ghosh et al., Biotech. Genet. Engin. Rev. 24: 165-78 (2007). It has been shown, however, that overlapping homologous recombination occurs in AAV infected cells between nucleic acids having 5′ end truncations and 3′ end truncations so that a “complete” nucleic acid encoding the large prot'in is generated, there'y reconstructing a functional, full-length gene.

[0069] Oversized AAV vectors are randomly truncated at the 5′ ends and lack a 5′ AAV ITR. Because AAV is a single-stranded DNA virus, and packages either the sense or antisense strand, the sense strand in oversized AAV vectors lacks the 5′ AAV ITR and possibly portions of the 5′ end of the target protein-coding gene, and the antisense strand in oversized AAV vectors lacks the 3′ ITR and possibly portions of the 3′ end of the target protein-coding gene. A functional transgene is produced in oversized AAV vector infected cells by annealing of the sense and antisense truncated genomes within the target cell. Thus, in certain embodiments, the AAV cMyBP-C vectors and/or viral particles comprise at least one ITR.

[0070] The term “inverted terminal repeat (ITR)” as used herein refers to the art-recognized regions found at the 5′ and 3′ termini of the AAV genome which function in cis as origins of DNA replication and as packaging signals for the viral genome. AAV ITRs, together with the AAV rep coding region, provide for efficient excision and rescue from, and integration of a nucleotide sequence interposed between two flanking ITRs into a host cell genome. Sequences of certain AAV-associated ITRs are disclosed by Yan et al., J. Virol. 79: 364-79 (2005) which is herein incorporated by reference in its entirety. ITR sequences that find use herein may be full length, wild-type AAV ITRs or fragments thereof that retain functional capability, or may be sequence variants of full-length, wild-type AAV ITRs that are capable of functioning in cis as origins of replication. AAV ITRs useful in the recombinant AAV cMyBP-C vectors of the embodiments provided herein may be derived from any known AAV serotype and, in certain embodiments, derived from the AAV2 or AAV5 serotype.

[0071] The term “control sequences” refers to DNA sequences necessary for the expression of an operably linked coding sequence in a particular host organism. The control sequences that are suitable for prokaryotes, for example, include a promoter, optionally an operator sequence, and a ribosome binding site. Eukaryotic cells are known to utilize promoters, polyadenylation signals, and enhancers.

[0072] A “transcription regulatory element” refers to nucleotide sequences of a gene involved in regulation of genetic transcription including a promoter, plus response elements, activator and enhancer sequences for binding of transcription factors to aid RNA polymerase binding and promote expression, and operator or silencer sequences to which repressor proteins bind to block RNA polymerase attachment and prevent expression. The term “cardiomyocyte-specific transcription regulatory element” or “cardiomyocyte-specific expression control element” refers to a regulatory element or region that produces preferred gene expression specifically in cardiomyocytes, e.g., a promoter whose activity in cardiac cells is at least 2-fold or at least 5-fold higher than in any other non-cardiac cell type. In some embodiments, the cardiomyocyte-specific promoter provides expression in cardiomyocytes at least 5-fold higher than in skeletal muscle cells. In some embodiments, the cardiomyocyte-specific promoter has an activity in cardiomyocytes at least 5-fold, at least 10-fold, at least 15-fold, at least 20-fold, at least 25-fold, or at least 50-fold higher compared to its activity in a non-cardiac cell type.

[0073] The cardiac-specific or cardiomyocyte-specific promoter is operably linked to the nucleic acid sequence encoding the cMyBP-C protein which means that the promoter is combined with the coding nucleic acid so as to enable the expression of said coding nucleic acid under the control of the promoter in cardiomyocytes when integrated into the genome of the cell or present as an extragenomic nucleic acid construct in the cell.

[0074] Transcription regulatory elements optionally include an enhancer element, intron, polyadenylation sequence, or post-transcriptional regulatory elements for increasing the expression level of the myosin binding protein. Examples include the SV40 early gene enhancer and the enhancer of the long terminal repeat (LTR) of Rous Sarcoma Virus (Gorman et al. (1982) Proc. Natl. Acad. Sci. 79:6777). The vector also optionally comprises transcription termination sequences and polyadenylation sequences for improved expression of the human and/or non-human antigen(s). Suitable transcription terminator and polyadenylation signals can, for example, be derived from SV40 (Sambrook et al (1989), Molecular Cloning: A Laboratory Manual). Preferably, a bGH polyadenylation signal is used in the vector of the invention. Any other element which is known in the art to support efficiency or specificity of expression may be added to the expression vector, such as the Woodchuck hepatitis post-transcriptional regulatory element (wPRE). To increase the cardiac or cardiomyocyte specificity, other elements can be introduced to inactivate the expression of genes in other tissues, such as sequences encoding miRNAs such as miR122 (Geisler et al., Gene Ther. 18: 199-209 (2011).

[0075] As used herein, an “intron” is broadly defined as a sequence of nucleotides that is removable by RNA splicing. “RNA splicing” means the excision of introns from a pre-mRNA to form a mature mRNA. Introns may be upstream, downstream, or within the coding region of a gene. Insertion of an intron into a nucleotide sequence can be accomplished by any method known in the art. The only limitation of where the intron is inserted is in consideration of the packaging limitations of the AAV virus particles (e.g., about 5 kb).

[0076] As used herein, the term “operably linked” is used to describe the connection between regulatory elements and a gene or its coding region. Typically, gene expression is placed under the control of one or more regulatory elements, for example, without limitation, constitutive or inducible promoters, tissue-specific regulatory elements, and enhancers. A gene or coding region is said to be “operably linked to” or “operatively linked to” or “operably associated with” the regulatory elements, meaning that the gene or coding region is controlled or influenced by the regulatory element. For instance, a promoter is operably linked to a coding sequence if the promoter effects transcription or expression of the coding sequence.

[0077] In certain embodiments, the recombinant AAV vector construct comprises (a) a nucleic acid comprising an AAV2 5′ inverted terminal repeat (ITR) (which may or may not be modified as known in the art), (b) a cardiomyocyte-specific transcription regulatory region, (c) a functional cMyBP-C protein coding region, (d) optionally, one or more introns, (e) a polyadenylation sequence, and (f) an AAV2 3′ ITR (which may or may not be modified as known in the art).

[0078] In one embodiment, the vector construct comprises a nucleic acid encoding a functionally active cMyBP-C protein. The cMyBP-C encoding sequence may be wild-type, codon optimized, or a variant. To visualize the exogenous gene expression in the heart, other optional elements can be introduced as part of the cMyBP-C encoding sequence, such as tag sequences (myc, FLAG, HA, His, and the like), or fluorochromes such as GFP, YFP, RFP.

[0079] As used herein, wild-type cardiac myosin binding protein C (MYBPC3 gene) has the following nucleic acid sequence SEQ ID NO: 1 (GenBank Accession No. NM_000256.2)

catggtgagtgcctggtgtgacgtctctcaggatgcctgagccggggaagaagccagtctcagcctttagcaagaag
ccacggtcagtggaagtggccgcaggcagccctgccgtgttcgaggccgagacagagcgggcaggagtgaaggtgcg
ctggcagcgcggaggcagtgacatcagcgccagcaacaagtacggcctggccacagagggcacacggcatacgctga
cagtgcgggaagtgggccctgccgaccagggatcttacgcagtcattgctggctcctccaaggtcaagttcgacctc
aaggtcatagaggcagagaaggcagagcccatgctggcccctgcccctgcccctgctgaggccactggagcccctgg
agaagccccggccccagccgctgagctgggagaaagtgccccaagtcccaaagggtcaagctcagcagctctcaatg
gtcctacccctggagcccccgatgaccccattggcctcttcgtgatgcggccacaggatggcgaggtgaccgtgggt
ggcagcatcaccttctcagcccgcgtggccggcgccagcctcctgaagccgcctgtggtcaagtggttcaagggcaa
atgggtggacctgagcagcaaggtgggccagcacctgcagctgcacgacagctacgaccgcgccagcaaggtctatc
tgttcgagctgcacatcaccgatgcccagcctgccttcactggcagctaccgctgtgaggtgtccaccaaggacaaa
tttgaatgctccaacttcaatctcactgtccacgaggccatgggcaccggagacctggacctcctatcagccttccg
ccgcacgagcctggctggaggtggtcggcggatcagtgatagccatgaggacactgggattctggacttcagctcac
tgctgaaaaagagagacagtttccggaccccgagggactcgaagctggaggcaccagcagaggaggacgtgtgggag
atcctacggcaggcacccccatctgagtacgagcgcatcgccttccagtacggcgtcactgacctgcgcggcatgct
aaagaggctcaagggcatgaggcgcgatgagaagaagagcacagcctttcagaagaagctggagccggcctaccagg
tgagcaaaggccacaagatccggctgaccgtggaactggctgaccatgacgctgaggtcaaatggctcaagaatggc
caggagatccagatgagcggcagcaagtacatctttgagtccatcggtgccaagcgtaccctgaccatcagccagtg
ctcattggcggacgacgcagcctaccagtgcgtggtgggtggcgagaagtgtagcacggagctctttgtgaaagagc
cccctgtgctcatcacgcgccccttggaggaccagctggtgatggtggggcagcgggtggagtttgagtgtgaagta
tcggaggagggggcgcaagtcaaatggctgaaggacggggtggagctgacccgggaggagaccttcaaataccggtt
caagaaggacgggcagagacaccacctgatcatcaacgaggccatgctggaggacgcggggcactatgcactgtgca
ctagcgggggccaggcgctgcgtgagctcattgtgcaggaaaagaagctggaggtgtaccagagcatcgcagacctg
atggtgggcgcaaaggaccaggcggtgttcaaatgtgaggtctcagatgagaatgttcggggtgtgtggctgaagaa
tgggaaggagctggtgcccgacagccgcataaaggtgtcccacatcgggcgggtccacaaactgaccattgacgacg
tcacacctgccgacgaggctgactacagctttgtgcccgagggcttcgcctgcaacctgtcagccaagctccacttc
atggaggtcaagattgacttcgtacccaggcaggaacctcccaagatccacctggactgcccaggccgcataccaga
caccattgtggttgtagctggaaataagctacgtctggacgtccctatctctggggaccctgctcccactgtgatct
ggcagaaggctatcacgcaggggaataaggccccagccaggccagccccagatgccccagaggacacaggtgacagc
gatgagtgggtgtttgacaagaagctgctgtgtgagaccgagggccgggtccgcgtggagaccaccaaggaccgcag
catcttcacggtcgagggggcagagaaggaagatgagggcgtctacacggtcacagtgaagaaccctgtgggcgagg
accaggtcaacctcacagtcaaggtcatcgacgtgccagacgcacctgcggcccccaagatcagcaacgtgggagag
gactcctgcacagtacagtgggagccgcctgcctacgatggcgggcagcccatcctgggctacatcctggagcgcaa
gaagaagaagagctaccggtggatgcagctgaacttcgacctgattcaggagctgagtcatgaagcgcggcgcatga
tcgagggcgtggtgtacgagatgcgcgtctacgcggtcaacgccatcggcatgtccaggcccagccctgcctcccag
cccttcatgcctatcggtccccccagcgaacccacccacctggcagtagaggacgtctctgacaccacggtctccct
caagtggcggcccccagagcgcgtgggagcaggaggcctggatggctacagcgtggagtactgcccagagggctgct
cagagtgggtggctgccctgcaggggctgacagagcacacatcgatactggtgaaggacctgcccacgggggcccgg
ctgcttttccgagtgcgggcacacaatatggcagggcctggagcccctgttaccaccacggagccggtgacagtgca
ggagatcctgcaacggccacggcttcagctgcccaggcacctgcgccagaccattcagaagaaggtcggggagcctg
tgaaccttctcatccctttccagggcaagccccggcctcaggtgacctggaccaaagaggggcagcccctggcaggc
gaggaggtgagcatccgcaacagccccacagacaccatcctgttcatccgggccgctcgccgcgtgcattcaggcac
ttaccaggtgacggtgcgcattgagaacatggaggacaaggccacgctggtgctgcaggttgttgacaagccaagtc
ctccccaggatctccgggtgactgacgcctggggtcttaatgtggctctggagtggaagccaccccaggatgtcggc
aacacggaactctgggggtacacagtgcagaaagccgacaagaagaccatggagtggttcaccgtcttggagcatta
ccgccgcacccactgcgtggtgccagagctcatcattggcaatggctactacttccgcgtcttcagccagaatatgg
ttggctttagtgacagagcggccaccaccaaggagcccgtctttatccccagaccaggcatcacctatgagccaccc
aactataaggccctggacttctccgaggccccaagcttcacccagcccctggtgaaccgctcggtcatcgcgggcta
cactgctatgctctgctgtgctgtccggggtagccccaagcccaagatttcctggttcaagaatggcctggacctgg
gagaagacgcccgcttccgcatgttcagcaagcagggagtgttgactctggagattagaaagccctgcccctttgac
gggggcatctatgtctgcagggccaccaacttacagggcgaggcacggtgtgagtgccgcctggaggtgcgagtgcc
tcagtgaccaggctggctcctggggatggccaggtacaaccggatgccagccccgtgccaggagcctggagggaagt
tggggaaacccctccctactgttggatgtatgtgtgacaagtgtgtctcctgtgctgcgatgggggatcagcagggc
agttgtcgggcagtcctgagtgggtgttgcacagactggtccacagggctcctgaaggaagcccctggatctttggg
gtaaaaggagggtggcctcaagaaacaatgtctggggacaggcctttctggcctgctatgtcttcccaatgtttatt
gggcaataaaagataagtgcagtcacagagaactcactcttc

[0080] As used herein, wild-type cardiac myosin binding protein C has the following amino acid sequence SEQ ID NO: 2 (GenBank Accession No. NP_000247.1)

MPEPGKKPVSAFSKKPRSVEVAAGSPAVFEAETERAGVK
VRWQRGGSDISASNKYGLATEGTRHTLTVREVGPADQG
SYAVIAGSSKVKFDLKVIEAEKAEPMLAPAPAPAEATGA
PGEAPAPAAELGESAPSPKGSSSAALNGPTPGAPDDPI
GLFVMRPQDGEVTVGGSITFSARVAGASLLKPPVVKWFK
GKWVDLSSKVGQHLQLHDSYDRASKVYLFELHITDAQP
AFTGSYRCEVSTKDKFECSNFNLTVHEAMGTGDLDLLSA
FRRTSLAGGGRRISDSHEDTGILDFSSLLKKRDSFRTP
RDSKLEAPAEEDVWEILRQAPPSEYERIAFQYGVTDLRG
MLKRLKGMRRDEKKSTAFQKKLEPAYQVSKGHKIRLTV
ELADHDAEVKWLKNGQEIQMSGSKYIFESIGAKRTLTIS
QCSLADDAAYQCVVGGEKCSTELFVKEPPVLITRPLED
QLVMVGQRVEFECEVSEEGAQVKWLKDGVELTREETFKY
RFKKDGQRHHLIINEAMLEDAGHYALCTSGGQALRELI
VQEKKLEVYQSIADLMVGAKDQAVFKCEVSDENVRGVWL
KNGKELVPDSRIKVSHIGRVHKLTIDDVTPADEADYSF
VPEGFACNLSAKLHFMEVKIDFVPRQEPPKIHLDCPGRI
PDTIVVVAGNKLRLDVPISGDPAPTVIWQKAITQGNKA
PARPAPDAPEDTGDSDEWVFDKKLLCETEGRVRVETTKD
RSIFTVEGAEKEDEGVYTVTVKNPVGEDQVNLTVKVID
VPDAPAAPKISNVGEDSCTVQWEPPAYDGGQPILGYILE
RKKKKSYRWMQLNFDLIQELSHEARRMIEGVVYEMRVY
AVNAIGMSRPSPASQPFMPIGPPSEPTHLAVEDVSDTTV
SLKWRPPERVGAGGLDGYSVEYCPEGCSEWVAALQGLT
EHTSILVKDLPTGARLLFRVRAHNMAGPGAPVTTTEPVT
VQEILQRPRLQLPRHLRQTIQKKVGEPVNLLIPFQGKP
RPQVTWTKEGQPLAGEEVSIRNSPTDTILFIRAARRVHS
GTYQVTVRIENMEDKATLVLQVVDKPSPPQDLRVTDAW
GLNVALEWKPPQDVGNTELWGYTVQKADKKTMEWFTVLE
HYRRTHCVVPELIIGNGYYFRVFSQNMVGFSDRAATTK
EPVFIPRPGITYEPPNYKALDFSEAPSFTQPLVNRSVIA
GYTAMLCCAVRGSPKPKISWFKNGLDLGEDARFRMFSK
QGVLTLEIRKPCPFDGGIYVCRATNLQGEARCECRLEVR
VPQ

[0081] The term “isolated” when used in relation to a nucleic acid molecule of the present disclosure typically refers to a nucleic acid sequence that is identified and separated from at least one contaminant nucleic acid with which it is ordinarily associated in its natural source. Isolated nucleic acid may be present in a form or setting that is different from that in which it is found in nature. Isolated nucleic acid molecules therefore are distinguished from the nucleic acid molecule as it exists in natural cells.

[0082] As used herein, the term “variant” refers to a polynucleotide (or polypeptide) having a sequence substantially similar to a reference polynucleotide (or polypeptide). Procedures for the introduction of nucleotide and amino acid changes in a polynucleotide, protein or polypeptide are known to the skilled artisan (see, e.g., Sambrook et al. (1989)). In the case of a polynucleotide, a variant can have deletions, substitutions, additions of one or more nucleotides at the 5′ end, 3′ end, and/or one or more internal sites in comparison to the reference polynucleotide. Similarities and/or differences in sequences between a variant and the reference polynucleotide can be detected using conventional techniques known in the art, for example polymerase chain reaction (PCR) and hybridization techniques. Variant polynucleotides also include synthetically derived polynucleotides, such as those generated, for example, by using site-directed mutagenesis. Generally, a variant of a polynucleotide, including, but not limited to, a DNA, can have at least about 50%, about 55%, about 60%, about 65%, about 70%, about 75%, about 80%, about 85%, about 90%, about 91%, about 92%, about 93%, about 94%, about 95%, about 96%, about 97%, about 98%, about 99% or more sequence identity to the reference polynucleotide as determined by sequence alignment programs known by skilled artisans. In the case of a polypeptide, a variant can have deletions, substitutions, additions of one or more amino acids in comparison to the reference polypeptide. Similarities and/or differences in sequences between a variant and the reference polypeptide can be detected using conventional techniques known in the art, for example Western blot. Generally, a variant of a polypeptide, can have at least about 60%, about 65%, about 70%, about 75%, about 80%, about 85%, about 90%, about 91%, about 92%, about 93%, about 94%, about 95%, about 96%, about 97%, about 98%, about 99% or more sequence identity to the reference polypeptide as determined by sequence alignment programs known by skilled artisans.

[0083] The amino acid substitutions can be conservative or non-conservative. It is preferred that the substitutions are conservative substitutions, i.e., a substitution of an amino acid residue by an amino acid of similar polarity, which acts as a functional equivalent. Preferably, the amino acid residue used as a substitute is selected from the same group of amino acids as the amino acid residue to be substituted. For example, a hydrophobic residue can be substituted with another hydrophobic residue, or a polar residue can be substituted with another polar residue having the same charge. Functionally homologous amino acids which may be used for a conservative substitution comprise, for example, non-polar amino acids such as glycine, valine, alanine, isoleucine, leucine, methionine, proline, phenylalanine, and tryptophan. Examples of uncharged polar amino acids comprise serine, threonine, glutamine, asparagine, tyrosine and cysteine. Examples of charged polar (basic) amino acids comprise histidine, arginine and lysine. Examples of charged polar (acidic) amino acids comprise aspartic acid and glutamic acid.

[0084] Also considered as variants are proteins which differ from their naturally occurring counterparts by addition, substitution or deletion of one or more (e.g., 2, 3, 4, 5, 10, or 15) additional amino acids. Additional amino acids may be present within the amino acid sequence of the original cMyBP-C protein (i.e., as an insertion), or they may be added to one or both termini of the protein. Such insertions, substitutions or deletions can take place at any position provided they do not impair the capability of the polypeptide to fulfill the function of the naturally occurring cMyBP-C protein and/or rescue the haploinsufficiency in the treated subject. Moreover, variants of cMyBP-C proteins also comprise proteins in which, compared to the original polypeptide, one or more amino acids are lacking. Such deletions may affect any amino acid position provided that it does not impair the ability to fulfill the normal function of the cMyBP-C protein and/or rescue the haploinsufficiency.

[0085] Finally, variants of the cardiac cMyBP-C protein also refer to proteins which differ from the naturally occurring protein by structural modifications, such as modified amino acids. Modified amino acids are amino acids which have been modified either by natural processes, such as processing or post-translational modifications, or by chemical modification processes known in the art. Typical amino acid modifications comprise phosphorylation, glycosylation, acetylation, O-Linked N-acetylglucosamination, glutathionylation, acylation, branching, ADP ribosylation, crosslinking, disulfide bridge formation, formylation, hydroxylation, carboxylation, methylation, demethylation, amidation, cyclization and/or covalent or non-covalent bonding to 25hosphatidylinositol, flavine derivatives, lipoteichonic acids, fatty acids or lipids. Such modifications have been extensively described in the literature, e.g., in Proteins: Structure and Molecular Properties, T. Creighton, 2^{nd} edition, W. H. Freeman and Company, New York (1993). In a preferred embodiment of the invention, the nucleic acid sequence encodes a constitutively phosphorylated isoform of human cMyBP-C. It has been shown that these isoforms are particularly cardioprotective (Sadayappan et al. (2005), Circ Res 97:1156-1163; Sadayappan et al., 2006; Proc Natl Acad Sci USA 103:16918-16923).

[0086] The term “identity,” “homology” and grammatical variations thereof, mean that two or more referenced entities are the same, when they are “aligned” sequences. Thus, by way of example, when two polypeptide sequences are identical, they have the same amino acid sequence, at least within the referenced region or portion. Where two polynucleotide sequences are identical, they have the same polynucleotide sequence, at least within the referenced region or portion. The identity can be over a defined area (region or domain) of the sequence. An “area” or “region” of identity refers to a portion of two or more referenced entities that are the same. Thus, where two polypeptide or nucleic acid sequences are identical over one or more sequence areas or regions they share identity within that region. An “aligned” sequence refers to multiple polynucleotide or polypeptide (amino acid) sequences, often containing corrections for missing or additional bases or amino acids (gaps) as compared to a reference sequence. “Substantial homology” means that a molecule is structurally or functionally conserved such that it has or is predicted to have at least partial structure or function of one or more of the structures or functions (e.g., a biological function or activity) of the reference molecule, or relevant/corresponding region or portion of the reference molecule to which it shares homology.

[0087] “Percent (%) nucleic acid sequence identity or homology” is defined as the percentage of nucleotides in a candidate sequence that are identical with a reference sequence after aligning the respective sequences and introducing gaps, if necessary, to achieve the maximum percent sequence identity. Alignment for purposes of determining percent nucleic acid sequence identity can be achieved in various ways that are within the skill in the art, for instance, using publicly available computer software such as ALIGN or Megalign (DNASTAR) software. Those skilled in the art can determine appropriate parameters for measuring alignment, including any algorithms needed to achieve maximal alignment over the full length of the sequences being compared.

[0088] “Percent (%) amino acid sequence identity or homology” with respect to the cMyBP-C amino acid sequences identified herein is defined as the percentage of amino acid residues in a candidate sequence that are identical to the amino acid residues in a cMyBP-C polypeptide sequence, after aligning the sequences and introducing gaps, if necessary, to achieve the maximum percent sequence identity, and not considering any conservative substitutions as part of the sequence identity. Alignment for purposes of determining percent amino acid sequence identity can be achieved in various ways that are within the skill in the art, for instance, using publicly available computer software such as ALIGN or Megalign (DNASTAR) software. Those skilled in the art can determine appropriate parameters for measuring alignment, including any algorithms needed to achieve maximal alignment over the full length of the sequences being compared.

[0089] “Codon optimization” or “codon optimized” refers to changes made in the nucleotide sequence so that it is more likely to be expressed at a relatively high level compared to the non-codon optimized sequence. It does not change the amino acid for which each codon encodes.

[0090] An “AAV virion” or “AAV viral particle” or “AAV vector particle” or “AAV virus” refers to a viral particle composed of at least one AAV capsid protein and an encapsulated AAV vector construct as described herein. If the particle comprises a heterologous polynucleotide (i.e., a polynucleotide other than a wild-type AAV genome such as a transgene to be delivered to a mammalian cell), it is typically referred to as a “recombinant AAV vector particle” or simply an “AAV vector”. Production of AAV vector particles necessarily includes production of AAV vector genome, as such a vector genome is contained within an AAV vector particle. It is understood that reference to the polynucleotide AAV vector construct encapsulated within the vector particle, and replication thereof, refers to the AAV vector genome.

[0091] As used herein “therapeutic AAV virus” refers to an AAV virion, AAV viral particle, AAV vector particle, or AAV virus that comprises a heterologous polynucleotide that encodes a therapeutic protein such as the cMyBP-C described herein. An “AAV vector construct” or “AAV vector genome” as used herein refers to a vector construct comprising one or more polynucleotide encoding a protein of interest (also called transgenes) that are flanked by at least one AAV terminal repeat sequences (ITRs) and operably linked to one or more expression control elements. Such AAV vector constructs can be replicated and packaged into infectious viral particles when present in a host cell that has been transfected with a vector encoding and expressing rep and cap gene products. The term generally refers to recombinant AAV that are capable of infecting cells such that the infected cells express (e.g., by transcription and/or by translation) an element (e.g., nucleotide sequence, protein, etc.) of interest. To this extent, the therapeutically effective rAAV particles can include AAV particles having capsids or vector genomes (vgs) with different properties. For example, the therapeutically effective rAAV particles can have capsids with different post translation modifications. In other examples, the therapeutically effective AAV particles can contain vector genomes of differing sizes/lengths, plus or minus strand sequences, different flip/flop ITR configurations flip/flop, flop/flip, flip/flip, flop/flop, etc.), different number of ITRs (1, 2, 3, etc.), or truncations. For example, overlapping homologous recombination occurs in rAAV infected cells between nucleic acids having 5′ end truncations and 3′ end truncations so that a “complete” nucleic acid encoding the large protein is generated, thereby reconstructing a functional, full-length gene. In other examples, complementary nucleic acid sequences having 5′ end truncations and 3′ end truncations interact with each such that a “complete” nucleic acid is formed during second strand synthesis. The “complete” nucleic acid encodes the large protein, thereby reconstructing a functional, full-length gene. Therapeutically effective rAAV particles are also referred to as heavy capsids, full capsids, or partially full capsids. Conversely, “therapeutically ineffective” AAV virus refer to empty capsids, i.e., capsids that have unquantifiable or undetectable vector genomes, or vector genomes that are not capable of recombining into a complete functional nucleic acid.

[0092] As used herein “therapeutic protein” refers to a polypeptide that has a biological activity that replaces or compensates for the loss or reduction of activity of an endogenous protein. For example, a functional cMyBP-C protein is a therapeutic protein for HCM.

[0093] “Hypertrophic cardiomyopathy” as used herein refers to an inherited disease caused by mutations in genes encoding components of the cardiac sarcomere, such as cardiac myosin binding protein C, that is characterized, for example, by symptoms of heart failure, arrhythmias, chest pain, shortness of breath, fatigue and dizziness, increased heart size, increased cardiothoracic ratio, increased end diastolic left ventricular diameter, increased end systolic left ventricular diameter, increased ventricular (anterior or posterior or both) wall thickness, decreased ejection time, decreased aortic peak flow velocity, and/or decreased aortic flow time.

[0094] “Cardiac myosin binding protein C deficiency” or a “deficiency in functional wild-type cardiac myosin binding protein C” as used herein refers to an inherited condition caused by reduced levels of functional cMyBP-C protein, due to absence of protein, reduced production of protein or production of protein that is nonfunctional. This includes HCM.

[0095] “Therapeutically effective for hypertrophic cardiomyopathy” or “Hypertrophic cardiomyopathy therapy” as used herein refers to any therapeutic intervention of a subject having HCM that ameliorates the characteristic deficiency in functional wild-type cMyBP-C, increases cMyBP-C protein levels, e.g., in myocardium, ameliorates HCM symptoms, or reduces the frequency, duration or severity of HCM symptoms.

[0096] “Hypertrophic cardiomyopathy gene therapy” as used herein refers to any therapeutic intervention of a subject having HCM that involves the replacement or restoration or increase of cMyBP-C through the delivery of one or more nucleic acid molecules to the cells of the subject that express functional cMyBP. In certain embodiments, MYBPC3 gene therapy refers to gene therapy involving an adeno associated viral (AAV) particle comprising a vector construct that expresses human cMyBP-C. In other embodiments, the gene therapy involves transfecting a plasmid that expresses human cMyBP-C.

[0097] “Treat” or “treatment” as used herein refers to preventive or therapeutic treatment which refers to a treatment administered to a subject who exhibits signs or symptoms of pathology, i.e., HCM, for the purpose of diminishing or eliminating those signs or symptoms or ameliorating their progression, severity or duration. The signs or symptoms can be biochemical, cellular, histological, functional, subjective or objective.

[0098] “Ameliorate” as used herein refers to the action of lessening the severity of symptoms, progression, or duration of a disease.

[0099] As used herein “stably treating” or “stable treatment” refers to using a therapeutic vector construct, AAV particle or cell administered to a subject where the subject stably expresses a therapeutic protein expressed by the vector construct, AAV particle or cell. Stably expressed therapeutic protein means that the protein is expressed for a clinically significant length of time. “Clinically significant length of time” as used herein means expression at therapeutically effective levels for a length of time that has a meaningful impact on the quality of life of the subject, e.g., demonstrated by reduced signs or symptoms of disease. In certain embodiments clinically, significant length of time is expression for at least six months, for at least eight months, for at least one year, for at least two years, for at least three years, for at least four years, for at least five years, for at least six years, for at least seven years, for at least eight years, for at least nine years, for at least ten years, or for the life of the subject.

[0100] As used herein, the term “effective amount” refers to an amount sufficient to effect beneficial or desirable biological and/or clinical results.

[0101] As used herein, a “subject” refers to an animal that is the object of treatment, observation or experiment. “Animal” includes cold- and warm-blooded vertebrates and invertebrates such as fish, shellfish, reptiles, and in particular, mammals. The term “avian” as used herein includes, but is not limited to, chickens, ducks, geese, quail, turkeys and pheasants. “Mammal,” as used herein, refers to an individual belonging to the class Mammalia and includes, but not limited to, humans, domestic and farm animals, zoo animals, sports and pet animals. Non-limiting examples of mammals include mice; rats; rabbits; guinea pigs; dogs; cats; sheep; goats; cows; horses; primates, such as monkeys, chimpanzees and apes, and, in particular, humans. In some embodiments, the mammal is a human, including an infant, child or juvenile human, e.g., a human age up to 2, 2-4, 2-6 or 2-12.

[0102] In general, a “pharmaceutically acceptable carrier” is one that is not toxic or unduly detrimental to cells and is preferably sterile. Exemplary pharmaceutically acceptable carriers include sterile, pyrogen-free water and sterile, pyrogen-free, saline or phosphate buffered saline. Pharmaceutically acceptable carriers include physiologically acceptable carriers. The term “pharmaceutically acceptable carrier” includes any and all solvents, dispersion media, coatings, antibacterial and antifungal agents, isotonic and absorption delaying agents, and the like that are physiologically compatible.

### Vector Constructs and AAV Vectors

[0103] The recombinant vector construct of the disclosure may be used itself as gene therapy, or may be used to produce rAAV particles by methods described herein, comprising providing to a suitable host cell the recombinant vector construct, together with Rep and Cap genes. The vector constructs described herein comprise a nucleic acid sequence that encodes a functional cMyBP-C. The recombinant vector construct may comprise a nucleic acid encoding functional human cMyBP-C operably linked to a heterologous expression control element, e.g., a promoter and/or enhancer; optionally an intron; and optionally a polyadenylation (polyA) signal. The heterologous expression control element may be a heterologous cardiomyocyte-specific transcription regulatory region, e.g., as described herein.

[0104] When used to produce rAAV particles, the recombinant vector construct may comprise (a) one or both of (i) an AAV 5′ inverted terminal repeat (ITR) sequence and (ii) an AAV 3′ ITR, (b) a heterologous cardiomyocyte-specific transcription regulatory region, and (c) a nucleic acid encoding a functional human cMyBP-C, optionally wherein the AAV ITRs are AAV2 ITRs. Preferably, the nucleic acid encoding the functional cMyBP-C is operably linked to cardiomyocyte-specific expression control elements. The vector construct may include additional expression control elements, for example: a promoter and/or enhancer; an intron; optionally an exon or fragment thereof; and a polyadenylation (polyA) signal. Such elements are further described herein. In certain embodiments, the recombinant AAV vector construct comprises a nucleic acid comprising (a) an AAV2 5′ inverted terminal repeat (ITR) (which may or may not be modified as known in the art), (b) a cardiomyocyte-specific transcription regulatory region, a functional MYBPC3 protein coding region, (c) one or more introns including fragments of longer introns, (d) optionally an exon or fragment thereof, I a polyadenylation sequence, and (f) an AAV2 3′ ITR (which may or may not be modified as known in the art).

[0105] Preferably, the rAAV particles also comprise an AAV capsid with cardiac tropism, optionally an AAV9 type capsid. Example capsids with cardiac tropism include AAV1, 6, 7 and 9.

[0106] Other embodiments provided herein are directed to vector constructs encoding a functional cMyBP-C polypeptide, wherein the constructs comprise one or more of the individual elements of the above described constructs and combinations thereof, in one or more different orientation(s). Another embodiment provided herein is directed to the above-described constructs in an opposite orientation.

[0107] The AAV vector constructs provided herein in single strand form range from about 4.5 kb to about 6.5 kb in length, or from about 4.5 kb to about 5.5 kb in length, or from about 4 kb to about 5.5 kb in length, or range from about 4.8 kb to about 5.2 k in length, or 4.8 kb to 5.1 kb in length, or range from about 4.9 kb to about 5.5 kb in length, or about 4.8 kb to about 6.0 kb in length, or about 5.0 kb to 6.2 kb in length or about 5.1 kb to about 6.3 kb in length, or about 5.2 kb to about 6.4 kb in length, or about 5.5 kb to about 6.5 kb in length, or range from about 4.0 kb to about 5.0 kb in length, or range from about 4 to about 4.5 kb in length, or range from about 4.5 kb to about 5 kb in length.

[0108] When AAV vectors are produced from oversized recombinant vector constructs, they may lack a portion of the 5′ or 3′ ends of the recombinant vector construct. Because AAV is a single-stranded DNA virus, and packages either the sense or antisense strand, the sense strand in oversized AAV vectors lacks the 5′ AAV ITR and possibly portions of the 5′ end of the target protein-coding gene, and the antisense strand in oversized AAV vectors lacks the 3′ ITR and possibly portions of the 3′ end of the target protein-coding gene. A functional transgene is produced in oversized AAV vector infected cells by annealing of the sense and antisense truncated genomes within the target cell. Thus, in certain embodiments, the rAAV particles of the invention may comprise recombinant vector constructs that comprise at least one ITR, and a substantial portion of a nucleotide sequence encoding a functional cMyBP-C, such as a fragment of SEQ ID NO: 1 or 42-45 that is greater than 50%, 60%, 70%, 80%, or 90% of the length of the nucleotide sequence. For example, the recombinant vector construct may comprise at least one ITR, a cardiomyocyte-specific transcription regulatory region, and a substantial portion of a nucleotide sequence encoding a functional cMyBP-C.

[0109] Generation of the vector constructs can be accomplished using any suitable genetic engineering techniques well known in the art, including, without limitation, the standard techniques of restriction endonuclease digestion, ligation, transformation, plasmid purification, and DNA sequencing, for example as described in Sambrook et al. (Molecular Cloning: A Laboratory Manual. Cold Spring Harbor Laboratory Press, N.Y. (1989)).

[0110] The vector constructs can incorporate sequences from the genome of any known organism. The sequences can be incorporated in their native form or can be modified in any way to obtain a desired activity. For example, the sequences can comprise insertions, deletions or substitutions.

[0111] AAV vector constructs can be replicated and packaged into infectious AAV particles, preferably replication deficient AAV particles, when present in a host cell that has been transfected with a polynucleotide encoding and expressing rep and cap gene product

### Transcription Regulatory Elements or Region

### Promoters and Enhancers.

[0112] In one or more embodiments, the nucleic acid sequence encoding cMyBP-C is operably linked to one or more heterologous expression control elements. Preferably, the expression control element is a cardiomyocyte-specific expression control element. Examples of cardiomyocyte-specific control elements include, but are not limited to human cardiac troponin T (hTNNT2) promoter or fragments or variants thereof. Other promoters with activity in cardiomyocytes include fragments or variants of any of: muscle creatine kinase (MCK) promoter, cytomegalovirus enhancer+myosin light chain 2 promoter (CMV-MLC2, or CMV-MLC1.5, CMV-MLC260), a phosphoglycerate kinase (PGK) promoter, a sarcomere-specific promoters, alpha myosin heavy chain promoter, myosin light chain 2v promoter, alpha myosin heavy chain promoter, alpha-cardiac actin promoter, alpha-tropomyosin promoter, cardiac troponin C promoter, cardiac troponin I promoter, cardiac myosin-binding protein C promoter, and/or sarco/endoplasmic reticulum Ca2+” ATPase (SERCA) promoter (e.g., iso-form 2 of this promoter (SERCA2)), and/or a striated muscle promoter, such as the desmin promoter. Enhancers derived from cardiomyocyte-specific transcriptional factor binding sites are also contemplated.

[0113] Examples of fragments or variants of hTNNT2 promoter include a cardiomyocyte-specific promoter sequence comprising a nucleic acid sequence at least 90% identical to SEQ ID NO: 47. In some embodiments, the cardiomyocyte-specific transcription regulatory region comprises a cardiomyocyte-specific promoter sequence comprising a nucleic acid sequence at least 80% identical to SEQ ID NO: 52. In some embodiments, the cardiomyocyte-specific transcription regulatory region comprises a cardiomyocyte-specific promoter sequence comprising a nucleic acid sequence at least 80% identical to SEQ ID NO: 51. In some embodiments, the cardiomyocyte-specific transcription regulatory region comprises a cardiomyocyte-specific promoter sequence comprising a nucleic acid sequence at least 80% identical to SEQ ID NO: 50. In some embodiments, the cardiomyocyte-specific transcription regulatory region comprises a cardiomyocyte-specific promoter sequence comprising a nucleic acid sequence at least 80% identical to SEQ ID NO: 49. In some embodiments, the cardiomyocyte-specific transcription regulatory region comprises a cardiomyocyte-specific promoter sequence comprising a nucleic acid sequence at least, or more than, 80%, 85%, 90%, 95%, 97%, 98% or 99% identical to any one of SEQ ID Nos: 49-52 (over the length of the SEQ ID NO). In any of the embodiments described herein, the cardiomyocyte-specific promoter optionally excludes any one of SEQ ID NO: 1 to 85 of U.S. Pat. Pub. No. 2021/0252165. In some embodiments, the cardiomyocyte-specific transcription regulatory region also comprises an intron that enhances expression of the cMyBP-C protein, and optionally an exon or fragment thereof, 5′ to the cMyBP-C coding sequence. For example, the vector construct and AAV particle comprise, in 5′ to 3′ orientation, a cardiomyocyte-specific promoter comprising a nucleotide sequence at least 80% identical to SEQ ID NO: 47, an intron nucleotide sequence at least 70% identical to SEQ ID NO: 53, and a nucleotide sequence encoding cMyBP-C.

[0114] In other embodiments, the cardiomyocyte-specific promoter comprises (a) a nucleic acid sequence at least 80% identical to any of (i) SEQ ID NO: 49 or a fragment thereof, (ii) SEQ ID NO: 50 or a fragment thereof, or (iii) SEQ ID NO: 51 or a fragment thereof and (b) an intron nucleotide sequence at least 60%, 65%, 70%, 75%, 80%, 85%, 90%, 95%, 97%, 98% or 99% identical to SEQ ID NO: 53. In alternative embodiments, the intron comprises a nucleotide sequence at least 70%, 75%, 80%, 85%, 90%, 95%, 97%, 98% or 99% identical to SEQ ID NO: 58. Other exemplary introns are SEQ ID NO: 53-58.

[0115] In some embodiments, the vector construct comprises (a) a nucleic acid sequence at least 90% identical to any of (i) SEQ ID NO: 49 or a fragment thereof, (ii) SEQ ID NO: 50 or a fragment thereof, or (iii) SEQ ID NO: 51 or a fragment thereof and (b) an intron comprising a nucleotide sequence at least 70%, 75%, 80%, 85%, 90%, 95%, 97%, 98% or 99% identical to SEQ ID NO: 53. In alternative embodiments, the intron comprises a nucleotide sequence at least 70%, 75%, 80%, 85%, 90%, 95%, 97%, 98% or 99% identical to SEQ ID NO: 58. Other exemplary introns are SEQ ID NO: 53-58.

[0116] In some embodiments, the cardiomyocyte-specific transcription regulatory region may further comprise (in addition to the fragment or variant of hTNNT2 promoter and globin intron) an exon sequence or fragment thereof, e.g., a globin intron adjacent to the 3′ end of a fragment of beta globin exon 3 (SEQ ID NO: 54). The combination of the intron and exon fragment is, for example, SEQ ID NO: 55. In some example embodiments, the cardiomyocyte-specific transcription regulatory region comprises SEQ ID NO: 56.

[0117] In some embodiments, the fragment or variant of the hTNNT2 promoter is more than 420 and less than 544 nucleotides in length and comprises a nucleic acid sequence at least 90% identical to SEQ ID NO: 47. In any of the embodiments described herein, the cardiomyocyte-specific promoter optionally excludes any one of SEQ ID NO: 1 to 85 of U.S. Pat. Pub. No. 2021/0252165.

[0118] In some embodiments, the cardiomyocyte-specific promoter sequence comprises a nucleic acid sequence at least, or more than, 80%, 85%, 90%, 95%, 97%, 98% or 99% identical to any of (i) SEQ ID NO: 49 or a fragment thereof, (ii) SEQ ID NO: 50 or a fragment thereof, (iii) SEQ ID NO: 51 or a fragment thereof, or (iv) SEQ ID NO: 52 or a fragment thereof. For example, the cardiomyocyte-specific promoter sequence comprises a nucleic acid sequence at least, or more than, 95%, 97%, 98% or 99% identical to any of (i) SEQ ID NO: 49 or a fragment thereof, (ii) SEQ ID NO: 50 or a fragment thereof, or (iii) SEQ ID NO: 51 or a fragment thereof. In an example embodiment, the sequence of the cardiomyocyte-specific promoter comprises a nucleotide sequence at least 96%, 97%, 98%, or 99% identical to SEQ ID NO: 51. In some example embodiments, the sequence of the hTNNT promoter comprises at least nucleotides 1-106 and 507-532 of SEQ ID NO: 51, or at least nucleotides 507-532 of SEQ ID NO: 51, or at least nucleotides 521-532 of SEQ ID NO: 51.

[0119] Various promoters can be operably linked with a nucleic acid comprising the coding region of the protein of interest, human cardiac myosin binding protein C, in the vector constructs disclosed herein. In some embodiments, the promoter can drive the expression of the protein of interest in a cell infected with a virus derived from the viral vector, such as a target cell. The promoter can be naturally occurring or non-naturally occurring. In some embodiments the promoter is a synthetic promoter. In one embodiment the synthetic promoter comprises sequences that do not exist in nature and which are designed to regulate the activity of an operably linked gene. In another embodiment the synthetic promoter comprises fragments of natural promoters to form new stretches of DNA sequence that do not exist in nature. Synthetic promoters are typically comprised of regulatory elements, promoters, enhancers, introns, splice donors and acceptors that are designed to produce enhanced tissue specific expression. Examples of promoters include, but are not limited to, viral promoters, plant promoters and mammalian promoters. In another embodiment the promoter is a cardiomyocyte specific promoter.

[0120] In some embodiments, the promoter comprises the human cardiac troponin T (hTNNT2) promoter. The portion of the hTNNT2 promoter can comprise a nucleic acid sequence having at least about 90%, at least about 95%, at least about 96%, at least about 97%, at least about 98%, at least about 99%, or more, sequence identity to any of SEQ ID Nos: 49-51. In some embodiments, the promoter is at least about, or more than, 95% identical to any of SEQ ID Nos: 49-51.

[0121] In some embodiments, the promoter constructs comprise one or more of additional individual enhancer elements, in one or more different orientation(s).

[0122] In some embodiments, the promoter is operably linked with a polynucleotide encoding one or more proteins of interest. In some embodiments, the promoter is operably linked with a polynucleotide encoding the cMyBP-C protein.

[0123] The size of the promoter can vary. Because of the limited packaging capacity of AAV, it is preferred to use a promoter that is small in size, but at the same time allows high level production of the protein(s) of interest in host cells. For example, in some embodiments the promoter is at most about 1.5 kb, at most about 1.4 kb, at most about 1.35 kb, at most about 1.3 kb, at most about 1.25 kb, at most about 1.2 kb, at most about 1.15 kb, at most about 1.1 kb, at most about 1.05 kb, at most about 1 kb, at most about 800 base pairs, at most about 600 base pairs, at most about 400 base pairs, at most about 200 base pairs, or at most about 100 base pairs.

### Other Regulatory Elements.

[0124] Various additional regulatory elements can be used in the vector constructs, for example enhancers to further increase expression level of the protein of interest in a host cell, a polyadenylation signal, a ribosome binding sequence, and/or a consensus splice acceptor or splice donor site. In some embodiments, the regulatory element can facilitate maintenance of the recombinant DNA molecule extrachromosomally in a host cell and/or improve vector potency (e.g., scaffold/matrix attachment regions (S/MARs)). Such regulatory elements are well known in the art.

[0125] The vectors constructs disclosed herein may include regulatory elements such as a transcription initiation region and/or a transcriptional termination region. Examples of a transcription termination region include, but are not limited to, polyadenylation signal sequences. Examples of polyadenylation signal sequences include, but are not limited to, mini polyA, human growth hormone (hGH) poly(A), bovine growth hormone (bGH) poly(A), SV40 late poly(A), rabbit beta-globin (rBG) poly(A), thymidine kinase (TK) poly(A) sequences, Proudfoot polyA, and any variants thereof. In some embodiments, the transcriptional termination region is located downstream of the posttranscriptional regulatory element. In some embodiments, the transcriptional termination region is a polyadenylation signal sequence. In some embodiments, the transcriptional termination region is a mini polyA (e.g., SEQ ID NO: 64), a bGH polyA (e.g., any of SEQ ID Nos: 59-61), a hGH polyA (e.g., SEQ ID NO: 62), a SV40 polyA (e.g., SEQ ID NO: 53), a Proudfoot synthetic polyA (e.g., SEQ ID NO: 65) or a rabbit beta-globin polyA (e.g., SEQ ID NO: 66) sequence or a fragment thereof about 40 to 200 nucleotides in length.

[0126] In some embodiments, the vector construct comprises a polyadenylation signal, optionally a bovine growth hormone (bGH) polyA signal (e.g., SEQ ID Nos: 59-61) or a human growth hormone (hGH) polyA signal (e.g., SEQ ID NO: 62) or fragment thereof.

[0127] The polyA signal may be about 150 to about 250 nucleotides in length, about 160 to about 240 nucleotides in length, about 170 to about 230 nucleotides in length, about 180 to about 220 nucleotides in length, or about 200 to about 210 nucleotides in length.

[0128] In some embodiments, the vector constructs can include additional transcription and translation initiation sequences, and/or additional transcription and translation terminator sequences, which are known in the art.

### Protein of Interest and Nucleic Acids Encoding the Protein of Interest.

[0129] As used herein, a “protein of interest” is any functional cMyBP-C protein, including naturally-occurring and non-naturally occurring variants thereof. In some embodiments, a polynucleotide encoding one or more cMy-BP-C proteins of interest can be inserted into the viral vectors disclosed herein, wherein the polynucleotide is operably linked with the promoter. In some instances, the promoter can drive the expression of the protein(s) of interest in a host cell (e.g., human myocardium).

[0130] In one or more embodiments, the functional cMyBP-C comprises an amino acid sequence at least 90%, 95% or 98% identical to SEQ ID NO: 2 (a human cardiac myosin binding protein C). The present disclosure also provides an isolated nucleic acid molecule which encodes such functional wild-type cMY-BP-C protein. The nucleotide sequence may be homologous to the wild-type nucleotide sequence of SEQ ID NO: 1. In certain embodiments, the nucleic acid molecule has at least 75%, at least 80%, at least 85%, at least 90%, at least 95% homology, or at least 98% homology to the nucleotide sequence of SEQ ID NO: 1, or at least 100, 200, 300, 400 or 500 consecutive nucleotides of SEQ ID NO: 1 or 42-43. In example embodiments, the nucleotide sequence encoding the functional cardiac myosin binding protein C is codon optimized or a variant, and may be at least 85%, 90%, 95%, 97%, 98% or 99% identical any of SEQ ID Nos: 44-46.

[0131] In certain embodiments, the nucleic acid molecule has at least 75%, at least 80%, at least 85%, at least 90%, at least 95% homology, or at least 98% homology to the nucleotide sequence of SEQ ID Nos: 1 or 42-46, or at least 100, 200, 300, 400 or 500 consecutive nucleotides of SEQ ID NO: 1 or 42-46.

[0132] In example embodiments, the nucleic acid sequence encoding the functional cMyBP-C is a wild-type MYBPC3 sequence, of which SEQ ID NO: 1 is one example, or is codon optimized, or is a variant. The vector constructs described herein may comprise a nucleotide sequence that differs from wild type nucleotide sequence but still encodes a functional cMyBP-C amino acid sequence at least 90%, 95% or 98% identical to SEQ ID NO: 2. According to this aspect, the nucleotide sequence may comprise a portion having at least 80%, 85%, 90% or 95% homology to at least 100 consecutive bases of SEQ ID NO: 1 or 42-46, as long as the nucleotide sequence encodes functional human cMyBP-C protein at least 90%, 95% or 98% identical to SEQ ID NO: 2. In example embodiments, the nucleotide sequence may comprise a portion having at least 90% homology to at least 100, 200, 300, 400, or 500 consecutive bases of SEQ ID NO: 1, as long as the nucleotide sequence encodes functional human cMyBP-C protein at least 90% identical to SEQ ID NO: 2. In example embodiments, the nucleotide sequence has substantial homology to the nucleotide sequence of SEQ ID NO: 1 or 42-46 and encodes functional cMyBP-C. The term substantial homology can be further defined with reference to a percent (%) homology, e.g., at least 80%, 85%, 90% or 95% homologous. This is discussed in further detail elsewhere herein.

[0133] In example embodiments, the nucleotide sequence of the gene of interest is codon optimized, preferably codon optimized for more efficient expression in humans, or for more efficient expression in a target organ, target tissue and/or target cells of humans. Target organs, tissues or cells include heart tissue and/or cardiomyocytes. The adaptiveness of a nucleotide sequence encoding a gene therapy product to the codon usage of human cells may be expressed as codon adaptation index (CAI). A codon adaptation index is herein defined as a measurement of the relative adaptiveness of the codon usage of a gene towards the codon usage of highly expressed human genes. The relative adaptiveness (w) of each codon is the ratio of the usage of each codon, to that of the most abundant codon for the same amino acid. The CAI is defined as the geometric mean of these relative adaptiveness values. Non-synonymous codons and termination codons (dependent on genetic code) are excluded. CAI values range from 0 to 1, with higher values indicating a higher proportion of the most abundant codons (see Sharp and Li, 1987, Nucleic Acids Research 15: 1281-1295; also see: Kim et al., Gene. 1997, 199:293-301; zur Megede et al., Journal of Virology, 2000, 74: 2628-2635). In certain embodiments, a gene of interest has a CAI of at least 0.75, 0.80, 0.85, 0.90, 0.95, or 0.99.

[0134] Codon optimization can be performed, for example, using the DNA2.0 codon optimization algorithm, see Villalobos et al., “Gene Designer: a synthetic biology tool for constructing artificial DNA segments,” BMC Bioinformatics, vol. 7, article no: 285 (2006) or Operon/Eurofins Genomics codon optimization software or other codon optimization tools, e.g., Grote et al., “Jcat: a novel tool to adapt codon usage of a target gene to its potential expression host,” Nucleic Acids Res. 33:W526-31 (2005).

[0135] In addition, or alternatively to codon optimization, the nucleotide sequence of the gene of interest can be adjusted to reduce CpG di-nucleotide content and optionally remove any extra ORF in the sense and anti-sense direction. CpG di-nucleotide content has been shown to activate TLR9 in dendritic cells leading to potential immune activation and CTL responses. Reducing CpG content may reduce liver inflammation and ALT. In some embodiments, the nucleotide sequence of the gene of interest has a CpG di-nucleotide content of less than 25, less than 20, less than 15, or less than 10. In another embodiment, the nucleotide sequence of the gene of interest has a GC content of less than 65%, less than 60%, or less than 55%.

[0136] Generally, codon optimization or CpG reduction does not change the amino acid for which each codon encodes. It simply changes the nucleotide sequence so that it is more likely to be expressed at a relatively high level compared to the non-optimized sequence.

[0137] As described herein, the nucleotide sequence encoding the cMyBP-C protein can be modified to improve expression efficiency of the protein. The methods that can be used to improve the transcription and/or translation of a gene herein are not particularly limited. For example, the nucleotide sequence can be modified to better reflect host codon usage to increase gene expression (e.g., protein production) in the host (e.g., a mammal). As another non-limiting example for the modification, one or more of the splice donors and/or splice acceptors in the nucleotide sequence of the protein of interest is modified to reduce the potential for extraneous splicing. As another non-limiting example for the modification, one or more introns can be inserted within or adjacent to the nucleotide sequence of the protein of interest to optimize AAV vector packaging and enhance expression.

[0138] The nucleic acid molecule encodes a functional cMyBP-C protein at least 90% identical to SEQ ID NO: 2 wild type amino acid sequence. If the nucleic acid encodes a protein comprising a sequence having changes to any of the wild-type amino acids, the protein should still be a functional protein. A skilled person will appreciate that minor changes can be made to some of the amino acids of the protein without adversely affecting the function of the protein.

[0139] In certain embodiments, the nucleic acid molecule, when expressed in a suitable system (e.g., a host cell), produces a functional cMyBP-C protein and at a relatively high level. Since the cMyBP-C that is produced is functional, it will have a conformation which is the same as at least a portion of the wild type cMyBP-C. In certain embodiments, a functional cMyBP-C protein produced as described herein effectively treats a subject suffering from deficiency in wild-type cMyBP-C protein and/or HCM.

[0140] It would be well within the capabilities of a skilled person to produce a nucleic acid molecule provided herein. This could be done, for example, using chemical synthesis of a given sequence. Further, suitable methods would be apparent to those skilled in the art for determining whether a nucleic acid described herein expresses a functional protein. For example, one suitable in vitro method involves inserting the nucleic acid into a vector, such as an AAV vector, transducing host cells, such as 293T or HeLa cells, with the vector, and assaying for cMyBP-C. Alternatively, a suitable in vivo method involves transducing a vector containing the nucleic acid into HCM mice and assaying for functional cMyBP-C.

### Introns

[0141] In some embodiments, the vector comprises one or more introns. The introns may facilitate processing of the RNA transcript in mammalian host cells, increase expression of the protein of interest and/or optimize packaging of the vector into AAV particles. Non-limiting examples of such an intron are a human beta globin intron, a human immunoglobulin G (IgG) intron or a native cMyBP-C intron. In some embodiments, the intron is a synthetic intron.

[0142] In some embodiments, the vector construct and/or AAV particle comprise a cardiomyocyte-specific promoter and one or more additional heterologous expression control elements, such as an intron that enhances expression of the cMyBP-C protein. For example, the vector construct and/or AAV particle comprise any of the cardiomyocyte-specific promoters as described above, and optionally an intron nucleotide sequence located 5′ to the nucleotide sequence encoding cMyBP-C. In further examples, the vector construct and/or AAV particle comprise any of the cardiomyocyte-specific promoters as described above, and optionally an intron nucleotide sequence located within the nucleotide sequence encoding cMyBP-C, for example, between any of the exons. In some embodiments, the intron sequence is located between exon 2 and 3. In some embodiments, the intron sequence is located at a position within the nucleic acid encoding cMyBP-C that corresponds to position 293 of SEQ ID NO: 1 or 42-46.

[0143] In one or more embodiments, the intron comprises a nucleotide sequence at least 60%, 65%, 70%, 75%, 80% or 85% or 90% or 95% identical to SEQ ID NO: 53, and the intron may be about 50 to about 150 nucleotides in length, or about 100 to about 135 nucleotides in length. In example embodiments, the intron comprises SEQ ID NO: 53 or a fragment thereof that is that is about 50-150 nucleotides, 75-145 nucleotides, 100-135 nucleotides, or 120-135 nucleotides of SEQ ID NO: 53 or a variant of said fragment that is at least 80%, 85%, 90%, or 95% identical to said fragment. In some embodiments, the intron can comprise a nucleotide sequence at least 70%, 75%, 80%, 85%, 90%, 95%, 97%, 98% or 99% identical to SEQ ID NO: 53.

[0144] In one or more embodiments, the intron comprises a nucleotide sequence at least 60%, 65%, 70%, 75%, 80% or 85% or 90% or 95% identical to SEQ ID NO: 58, and the intron may be about 50 to about 150 nucleotides in length, or about 100 to about 135 nucleotides in length. In example embodiments, the intron comprises SEQ ID NO: 58 or a fragment thereof that is that is about 50-150 nucleotides, 75-145 nucleotides, 100-135 nucleotides, or 120-135 nucleotides of SEQ ID NO: 58 or a variant of said fragment that is at least 80%, 85%, 90%, or 95% identical to said fragment. In some embodiments, the intron can comprise a nucleotide sequence at least 70%, 75%, 80%, 85%, 90%, 95%, 97%, 98% or 99% identical to SEQ ID NO: 58.

[0145] Other exemplary introns comprise a nucleotide sequence at least 60%, 65%, 70%, 75%, 80% or 85% or 90% or 95% identical to any one of SEQ ID NO: 53-58.

[0146] In some embodiments, the vector constructs may further comprise an exon sequence or fragment thereof; preferably adjacent to the 5′ or 3′ end of an intron sequence. In an example embodiment, the vector construct comprises a globin intron adjacent to an exon comprising a nucleotide sequence at least 80% or 85% or 90% or 95% identical to SEQ ID NO: 54. In a further example embodiment, the vector construct comprises a globin intron adjacent to an exon sequence comprising a nucleotide sequence at least 80% or 85% or 90% or 95% identical to SEQ ID NO: 53. In an example embodiment, the vector construct comprises a globin intron adjacent to an HbB exon sequence comprising a nucleotide sequence at least 80% or 85% or 90% identical to SEQ ID NO: 54.

[0147] The location and size of the intron in the vector can vary. In some embodiments, the intron is located between the promoter and the sequence encoding the protein of interest. In some embodiments, the intron is located downstream of the sequence encoding the protein of interest. In some embodiments, the intron is located within the promoter. In some embodiments, the intron includes an enhancer element. In some embodiments, the intron is located within the sequence encoding the protein of interest, preferably between exons of the sequence encoding the protein of interest. In some embodiments, the intron may comprise all or a portion of a naturally occurring intron within the sequence encoding the protein of interest. In some embodiments, the intron is a globin intron. In some embodiments, the intron is a chimeric intron and comprises a fragment of a human IgG intron.

[0148] Inclusion of an intron element may enhance expression compared with expression in the absence of the intron element (see e.g., Kurachi et al., J. Biol. Chem. 270(10): 5276-81 (1995). AAV vectors typically accept inserts of DNA having a defined size range which is generally about 4 kb to about 5.4 kb, or slightly more. However, there is no minimum size for packaging and small vector genomes package very efficiently. Introns and intron fragments fulfill this requirement while also enhancing expression. Thus, the present disclosure is not limited to the inclusion of cMyBP-C intron sequences in the AAV vector and include other introns or other DNA sequences in place of portions of a cMyBP-C intron. Additionally, other 5′ and 3′ untranslated regions of nucleic acid may be used in place of those recited for human cMyBP-C.

[0149] In some embodiments, the vector construct comprises a nucleotide sequence at least 97%, 98% or 99% identical to any of SEQ ID NO: 3-41 or 92-169. In other embodiments, the vector construct comprises a nucleotide sequence at least 97%, 98% or 99% identical to a nucleotide sequence that is complementary to or is a negative (−) strand of any of SEQ ID NO: 3-41 or 92-169.

[0150] In some embodiments, the vector construct comprises a nucleotide sequence at least 97%, 98% or 99% identical to any of SEQ ID NO: 3, 6, 9, 12, 15, 18, 21, 24, 27, 30, 33, 36, or 39. In other embodiments, the vector construct comprises a nucleotide sequence at least 97%, 98% or 99% identical to a nucleotide sequence that is complementary to or is a negative (−) strand of any of SEQ ID NO: 3, 6, 9, 12, 15, 18, 21, 24, 27, 30, 33, 36, or 39.

[0151] In some embodiments, the vector construct comprises a nucleotide sequence at least 97%, 98% or 99% identical to any of SEQ ID NO: 4, 7, 10, 13, 16, 19, 22, 25, 28, 31, 34, 37, or 40. In other embodiments, the vector construct comprises a nucleotide sequence at least 97%, 98% or 99% identical to a nucleotide sequence that is complementary to or is a negative (−) strand of any of SEQ ID NO: 4, 7, 10, 13, 16, 19, 22, 25, 28, 31, 34, 37, or 40.

[0152] In some embodiments, the vector construct comprises a nucleotide sequence at least 97%, 98% or 99% identical to any of SEQ ID NO: 5, 8, 11, 14, 17, 20, 23, 26, 29, 32, 35, 38, or 41. In other embodiments, the vector construct comprises a nucleotide sequence at least 97%, 98% or 99% identical to a nucleotide sequence that is complementary to or is a negative (−) strand of any of 5, 8, 11, 14, 17, 20, 23, 26, 29, 32, 35, 38, or 41.

[0153] Example embodiments include the following: Construct C1 is 4950 bp in length (SEQ ID NO: 29) and comprises the following elements in 5′ to 3′: 5′ AAV2-ITR (130 bp) (SEQ ID NO: 67), hTNNT2 promoter (544 bp) (SEQ ID NO: 52), chimeric intron (133 bp) (SEQ ID NO: 58), codon optimized hMYBPC3 (SEQ ID NO: 44), mini poly A (57 bp) (SEQ ID NO: 64) and 3′ AAV2 ITR (130 bp) (SEQ ID NO: 71).

[0154] In some embodiments, Construct C1 is 4980 bp in length (SEQ ID NO: 28) and comprises the following elements in 5′ to 3′: 5′ AAV2-ITR (145 bp) (SEQ ID NO: 68), hTNNT2 promoter (544 bp) (SEQ ID NO: 52), chimeric intron (133 bp) (SEQ ID NO: 58), codon optimized hMYBPC3 (SEQ ID NO: 44), mini poly A (57 bp) (SEQ ID NO: 64) and 3′ AAV2 ITR (145 bp) (SEQ ID NO: 72).

[0155] In some embodiments, Construct C1 is 4950 bp in length (SEQ ID NO: 92) and comprises the following elements in 5′ to 3′: 5′ AAV2-ITR (130 bp) (SEQ ID NO: 69), hTNNT2 promoter (544 bp) (SEQ ID NO: 52), chimeric intron (133 bp) (SEQ ID NO: 58), codon optimized hMYBPC3 (SEQ ID NO: 44), mini poly A (57 bp) (SEQ ID NO: 64) and 3′ AAV2 ITR (130 bp) (SEQ ID NO: 73).

[0156] In some embodiments, Construct C1 is 4980 bp in length (SEQ ID NO: 93) and comprises the following elements in 5′ to 3′: 5′ AAV2-ITR (145 bp) (SEQ ID NO: 70), hTNNT2 promoter (544 bp) (SEQ ID NO: 52), chimeric intron (133 bp) (SEQ ID NO: 58), codon optimized hMYBPC3 (SEQ ID NO: 44), mini poly A (57 bp) (SEQ ID NO: 64) and 3′ AAV2 ITR (145 bp) (SEQ ID NO: 74).

[0157] In some embodiments, Construct C1 is 4950 bp in length (SEQ ID NO: 94) and comprises the following elements in 5′ to 3′: 5′ AAV2-ITR (130 bp) (SEQ ID NO: 67), hTNNT2 promoter (544 bp) (SEQ ID NO: 52), chimeric intron (133 bp) (SEQ ID NO: 58), codon optimized hMYBPC3 (SEQ ID NO: 44), mini poly A (57 bp) (SEQ ID NO: 64) and 3′ AAV2 ITR (130 bp) (SEQ ID NO: 73).

[0158] In some embodiments, Construct C1 is 4980 bp in length (SEQ ID NO: 95) and comprises the following elements in 5′ to 3′: 5′ AAV2-ITR (145 bp) (SEQ ID NO: 68), hTNNT2 promoter (544 bp) (SEQ ID NO: 52), chimeric intron (133 bp) (SEQ ID NO: 58), codon optimized hMYBPC3 (SEQ ID NO: 44), mini poly A (57 bp) (SEQ ID NO: 64) and 3′ AAV2 ITR (145 bp) (SEQ ID NO: 74).

[0159] In some embodiments, Construct C1 is 4950 bp in length (SEQ ID NO: 96) and comprises the following elements in 5′ to 3′: 5′ AAV2-ITR (130 bp) (SEQ ID NO: 69), hTNNT2 promoter (544 bp) (SEQ ID NO: 52), chimeric intron (133 bp) (SEQ ID NO: 58), codon optimized hMYBPC3 (SEQ ID NO: 44), mini poly A (57 bp) (SEQ ID NO: 64) and 3′ AAV2 ITR (130 bp) (SEQ ID NO: 69).

[0160] In some embodiments, Construct C1 is 4980 bp in length (SEQ ID NO: 97) and comprises the following elements in 5′ to 3′: 5′ AAV2-ITR (145 bp) (SEQ ID NO: 70), hTNNT2 promoter (544 bp) (SEQ ID NO: 52), chimeric intron (133 bp) (SEQ ID NO: 58), codon optimized hMYBPC3 (SEQ ID NO: 44), mini poly A (57 bp) (SEQ ID NO: 64) and 3′ AAV2 ITR (145 bp) (SEQ ID NO: 72).

[0161] In some embodiments, Construct C1 is 4640 bp in length (SEQ ID NO: 27) and comprises the following elements in 5′ to 3′: hTNNT2 promoter (544 bp) (SEQ ID NO: 52), chimeric intron (133 bp) (SEQ ID NO: 58), codon optimized hMYBPC3 (SEQ ID NO: 44), and mini poly A (57 bp) (SEQ ID NO: 64). In further embodiments, Construct C1 optionally comprises any of the 5′ AAV2-ITR sequences of SEQ ID NO: 67-70 (or the complement thereof) and/or any of the 3′ AAV2-ITR sequences of SEQ ID NO: 71-74 (or the complement thereof), or fragments thereof.

[0162] Construct C2 is 4801 bp in length (SEQ ID NO: 32) and comprises the following elements in 5′ to 3′: 5′ AAV2-ITR (130 bp) (SEQ ID NO: 67), hTNNT2 promoter (544 bp) (SEQ ID NO: 52), codon optimized hMYBPC3 (SEQ ID NO: 44), mini poly A (57 bp) (SEQ ID NO: 64) and 3′ AAV2 ITR (130 bp) (SEQ ID NO: 71).

[0163] In some embodiments, Construct C2 is 4831 bp in length (SEQ ID NO: 31) and comprises the following elements in 5′ to 3′: 5′ AAV2-ITR (145 bp) (SEQ ID NO: 68), hTNNT2 promoter (544 bp) (SEQ ID NO: 52), codon optimized hMYBPC3 (SEQ ID NO: 44), mini poly A (57 bp) (SEQ ID NO: 64) and 3′ AAV2 ITR (145 bp) (SEQ ID NO: 72).

[0164] In some embodiments, Construct C2 is 4801 bp in length (SEQ ID NO: 98) and comprises the following elements in 5′ to 3′: 5′ AAV2-ITR (130 bp) (SEQ ID NO: 69), hTNNT2 promoter (544 bp) (SEQ ID NO: 52), codon optimized hMYBPC3 (SEQ ID NO: 44), mini poly A (57 bp) (SEQ ID NO: 64) and 3′ AAV2 ITR (130 bp) (SEQ ID NO: 73).

[0165] In some embodiments, Construct C2 is 4831 bp in length (SEQ ID NO: 99) and comprises the following elements in 5′ to 3′: 5′ AAV2-ITR (145 bp) (SEQ ID NO: 70), hTNNT2 promoter (544 bp) (SEQ ID NO: 52), codon optimized hMYBPC3 (SEQ ID NO: 44), mini poly A (57 bp) (SEQ ID NO: 64) and 3′ AAV2 ITR (145 bp) (SEQ ID NO: 74).

[0166] In some embodiments, Construct C2 is 4801 bp in length (SEQ ID NO: 100) and comprises the following elements in 5′ to 3′: 5′ AAV2-ITR (130 bp) (SEQ ID NO: 67), hTNNT2 promoter (544 bp) (SEQ ID NO: 52), codon optimized hMYBPC3 (SEQ ID NO: 44), mini poly A (57 bp) (SEQ ID NO: 64) and 3′ AAV2 ITR (130 bp) (SEQ ID NO: 73).

[0167] In some embodiments, Construct C2 is 4831 bp in length (SEQ ID NO: 101) and comprises the following elements in 5′ to 3′: 5′ AAV2-ITR (145 bp) (SEQ ID NO: 68), hTNNT2 promoter (544 bp) (SEQ ID NO: 52), codon optimized hMYBPC3 (SEQ ID NO: 44), mini poly A (57 bp) (SEQ ID NO: 64) and 3′ AAV2 ITR (145 bp) (SEQ ID NO: 74).

[0168] In some embodiments, Construct C2 is 4801 bp in length (SEQ ID NO: 102) and comprises the following elements in 5′ to 3′: 5′ AAV2-ITR (130 bp) (SEQ ID NO: 69), hTNNT2 promoter (544 bp) (SEQ ID NO: 52), codon optimized hMYBPC3 (SEQ ID NO: 44), mini poly A (57 bp) (SEQ ID NO: 64) and 3′ AAV2 ITR (130 bp) (SEQ ID NO: 71).

[0169] In some embodiments, Construct C2 is 4831 bp in length (SEQ ID NO: 103) and comprises the following elements in 5′ to 3′: 5′ AAV2-ITR (145 bp) (SEQ ID NO: 70), hTNNT2 promoter (544 bp) (SEQ ID NO: 52), codon optimized hMYBPC3 (SEQ ID NO: 44), mini poly A (57 bp) (SEQ ID NO: 64) and 3′ AAV2 ITR (145 bp) (SEQ ID NO: 72).

[0170] In some embodiments, Construct C2 is 4491 bp in length (SEQ ID NO: 30) and comprises the following elements in 5′ to 3′: hTNNT2 promoter (544 bp) (SEQ ID NO: 52), codon optimized hMYBPC3 (SEQ ID NO: 44), and mini poly A (57 bp) (SEQ ID NO: 64). In further embodiments, Construct C2 optionally comprises any of the 5′ AAV2-ITR sequences of SEQ ID NO: 67-70 (or the complement thereof) and/or any of the 3′ AAV2-ITR sequences of SEQ ID NO: 71-74 (or the complement thereof), or fragments thereof.

[0171] Construct C3 is 4801 bp in length (SEQ ID NO: 35) and comprises the following elements in 5′ to 3′: 5′ AAV2-ITR (130 bp) (SEQ ID NO: 67), hTNNT2 promoter (544 bp) (SEQ ID NO: 52), wild type hMYBPC3 (SEQ ID NO: 43), mini poly A (57 bp) (SEQ ID NO: 64) and 3′ AAV2 ITR (130 bp) (SEQ ID NO: 71).

[0172] In some embodiments, Construct C3 is 4831 bp in length (SEQ ID NO: 34) and comprises the following elements in 5′ to 3′: 5′ AAV2-ITR (145 bp) (SEQ ID NO: 68), hTNNT2 promoter (544 bp) (SEQ ID NO: 52), wild type hMYBPC3 (SEQ ID NO: 43), mini poly A (57 bp) (SEQ ID NO: 64) and 3′ AAV2 ITR (130 bp) (SEQ ID NO: 72).

[0173] In some embodiments, Construct C3 is 4801 bp in length (SEQ ID NO: 104) and comprises the following elements in 5′ to 3′: 5′ AAV2-ITR (130 bp) (SEQ ID NO: 69), hTNNT2 promoter (544 bp) (SEQ ID NO: 52), wild type hMYBPC3 (SEQ ID NO: 43), mini poly A (57 bp) (SEQ ID NO: 64) and 3′ AAV2 ITR (130 bp) (SEQ ID NO: 73).

[0174] In some embodiments, Construct C3 is 4831 bp in length (SEQ ID NO: 105) and comprises the following elements in 5′ to 3′: 5′ AAV2-ITR (145 bp) (SEQ ID NO: 70), hTNNT2 promoter (544 bp) (SEQ ID NO: 52), wild type hMYBPC3 (SEQ ID NO: 43), mini poly A (57 bp) (SEQ ID NO: 64) and 3′ AAV2 ITR (130 bp) (SEQ ID NO: 74).

[0175] In some embodiments, Construct C3 is 4801 bp in length (SEQ ID NO: 106) and comprises the following elements in 5′ to 3′: 5′ AAV2-ITR (130 bp) (SEQ ID NO: 67), hTNNT2 promoter (544 bp) (SEQ ID NO: 52), wild type hMYBPC3 (SEQ ID NO: 43), mini poly A (57 bp) (SEQ ID NO: 64) and 3′ AAV2 ITR (130 bp) (SEQ ID NO: 73).

[0176] In some embodiments, Construct C3 is 4831 bp in length (SEQ ID NO: 107) and comprises the following elements in 5′ to 3′: 5′ AAV2-ITR (145 bp) (SEQ ID NO: 68), hTNNT2 promoter (544 bp) (SEQ ID NO: 52), wild type hMYBPC3 (SEQ ID NO: 43), mini poly A (57 bp) (SEQ ID NO: 64) and 3′ AAV2 ITR (130 bp) (SEQ ID NO: 74).

[0177] In some embodiments, Construct C3 is 4801 bp in length (SEQ ID NO: 108) and comprises the following elements in 5′ to 3′: 5′ AAV2-ITR (130 bp) (SEQ ID NO: 69), hTNNT2 promoter (544 bp) (SEQ ID NO: 52), wild type hMYBPC3 (SEQ ID NO: 43), mini poly A (57 bp) (SEQ ID NO: 64) and 3′ AAV2 ITR (130 bp) (SEQ ID NO: 71).

[0178] In some embodiments, Construct C3 is 4831 bp in length (SEQ ID NO: 109) and comprises the following elements in 5′ to 3′: 5′ AAV2-ITR (145 bp) (SEQ ID NO: 70), hTNNT2 promoter (544 bp) (SEQ ID NO: 52), wild type hMYBPC3 (SEQ ID NO: 43), mini poly A (57 bp) (SEQ ID NO: 64) and 3′ AAV2 ITR (130 bp) (SEQ ID NO: 72).

[0179] In some embodiments, Construct C3 is 4491 bp in length (SEQ ID NO: 33) and comprises the following elements in 5′ to 3′: hTNNT2 promoter (544 bp) (SEQ ID NO: 52), wild type hMYBPC3 (SEQ ID NO: 43), and mini poly A (57 bp) (SEQ ID NO: 64). In further embodiments, Construct C3 optionally comprises any of the 5′ AAV2-ITR sequences of SEQ ID NO: 67-70 (or the complement thereof) and/or any of the 3′ AAV2-ITR sequences of SEQ ID NO: 71-74 (or the complement thereof), or fragments thereof.

[0180] Construct C4 is 4950 bp in length (SEQ ID NO: 38) and comprises the following elements in 5′ to 3′: 5′ AAV2-ITR (130 bp) (SEQ ID NO: 67), hTNNT2 promoter (544 bp) (SEQ ID NO: 52), chimeric intron (133 bp) (SEQ ID NO: 58), wild type hMYBPC3 (SEQ ID NO: 43), mini poly A (57 bp) (SEQ ID NO: 64) and 3′ AAV2 ITR (130 bp) (SEQ ID NO: 71).

[0181] In some embodiments, Construct C4 is 4980 bp in length (SEQ ID NO: 37) and comprises the following elements in 5′ to 3′: 5′ AAV2-ITR (145 bp) (SEQ ID NO: 68), hTNNT2 promoter (544 bp) (SEQ ID NO: 52), chimeric intron (133 bp) (SEQ ID NO: 58), wild type hMYBPC3 (SEQ ID NO: 43), mini poly A (57 bp) (SEQ ID NO: 64) and 3′ AAV2 ITR (145 bp) (SEQ ID NO: 72).

[0182] In some embodiments, Construct C4 is 4950 bp in length (SEQ ID NO: 110) and comprises the following elements in 5′ to 3′: 5′ AAV2-ITR (130 bp) (SEQ ID NO: 69), hTNNT2 promoter (544 bp) (SEQ ID NO: 52), chimeric intron (133 bp) (SEQ ID NO: 58), wild type hMYBPC3 (SEQ ID NO: 43), mini poly A (57 bp) (SEQ ID NO: 64) and 3′ AAV2 ITR (130 bp) (SEQ ID NO: 73).

[0183] In some embodiments, Construct C4 is 4980 bp in length (SEQ ID NO: 111) and comprises the following elements in 5′ to 3′: 5′ AAV2-ITR (145 bp) (SEQ ID NO: 70), hTNNT2 promoter (544 bp) (SEQ ID NO: 52), chimeric intron (133 bp) (SEQ ID NO: 58), wild type hMYBPC3 (SEQ ID NO: 43), mini poly A (57 bp) (SEQ ID NO: 64) and 3′ AAV2 ITR (145 bp) (SEQ ID NO: 74).

[0184] In some embodiments, Construct C4 is 4950 bp in length (SEQ ID NO: 112) and comprises the following elements in 5′ to 3′: 5′ AAV2-ITR (130 bp) (SEQ ID NO: 67), hTNNT2 promoter (544 bp) (SEQ ID NO: 52), chimeric intron (133 bp) (SEQ ID NO: 58), wild type hMYBPC3 (SEQ ID NO: 43), mini poly A (57 bp) (SEQ ID NO: 64) and 3′ AAV2 ITR (130 bp) (SEQ ID NO: 73).

[0185] In some embodiments, Construct C4 is 4980 bp in length (SEQ ID NO: 113) and comprises the following elements in 5′ to 3′: 5′ AAV2-ITR (145 bp) (SEQ ID NO: 68), hTNNT2 promoter (544 bp) (SEQ ID NO: 52), chimeric intron (133 bp) (SEQ ID NO: 58), wild type hMYBPC3 (SEQ ID NO: 43), mini poly A (57 bp) (SEQ ID NO: 64) and 3′ AAV2 ITR (145 bp) (SEQ ID NO: 74).

[0186] In some embodiments, Construct C4 is 4950 bp in length (SEQ ID NO: 114) and comprises the following elements in 5′ to 3′: 5′ AAV2-ITR (130 bp) (SEQ ID NO: 69), hTNNT2 promoter (544 bp) (SEQ ID NO: 52), chimeric intron (133 bp) (SEQ ID NO: 58), wild type hMYBPC3 (SEQ ID NO: 43), mini poly A (57 bp) (SEQ ID NO: 64) and 3′ AAV2 ITR (130 bp) (SEQ ID NO: 71).

[0187] In some embodiments, Construct C4 is 4980 bp in length (SEQ ID NO: 115) and comprises the following elements in 5′ to 3′: 5′ AAV2-ITR (145 bp) (SEQ ID NO: 70), hTNNT2 promoter (544 bp) (SEQ ID NO: 52), chimeric intron (133 bp) (SEQ ID NO: 58), wild type hMYBPC3 (SEQ ID NO: 43), mini poly A (57 bp) (SEQ ID NO: 64) and 3′ AAV2 ITR (145 bp) (SEQ ID NO: 72).

[0188] In some embodiments, Construct C4 is 4640 bp in length (SEQ ID NO: 36) and comprises the following elements in 5′ to 3′: hTNNT2 promoter (544 bp) (SEQ ID NO: 52), chimeric intron (133 bp) (SEQ ID NO: 58), wild type hMYBPC3 (SEQ ID NO: 43), and mini poly A (57 bp) (SEQ ID NO: 64). In further embodiments, Construct C4 optionally comprises any of the 5′ AAV2-ITR sequences of SEQ ID NO: 67-70 (or the complement thereof) and/or any of the 3′ AAV2-ITR sequences of SEQ ID NO: 71-74 (or the complement thereof), or fragments thereof.

[0189] Construct C5 is 4950 bp in length (SEQ ID NO: 41) and comprises the following elements in 5′ to 3′: 5′ AAV2-ITR (130 bp) (SEQ ID NO: 67), hTNNT2 promoter (544 bp) (SEQ ID NO: 52), chimeric intron (133 bp) (SEQ ID NO: 58), CpG free hMYBPC3 (SEQ ID NO: 45), mini poly A (57 bp) (SEQ ID NO: 64) and 3′ AAV2 ITR (130 bp) (SEQ ID NO: 71).

[0190] In some embodiments, Construct C5 is 4980 bp in length (SEQ ID NO: 40) and comprises the following elements in 5′ to 3′: 5′ AAV2-ITR (145 bp) (SEQ ID NO: 68), hTNNT2 promoter (544 bp) (SEQ ID NO: 52), chimeric intron (133 bp) (SEQ ID NO: 58), CpG free hMYBPC3 (SEQ ID NO: 45), mini poly A (57 bp) (SEQ ID NO: 64) and 3′ AAV2 ITR (145 bp) (SEQ ID NO: 72).

[0191] In some embodiments, Construct C5 is 4950 bp in length (SEQ ID NO: 116) and comprises the following elements in 5′ to 3′: 5′ AAV2-ITR (130 bp) (SEQ ID NO: 69), hTNNT2 promoter (544 bp) (SEQ ID NO: 52), chimeric intron (133 bp) (SEQ ID NO: 58), CpG free hMYBPC3 (SEQ ID NO: 45), mini poly A (57 bp) (SEQ ID NO: 64) and 3′ AAV2 ITR (130 bp) (SEQ ID NO: 73).

[0192] In some embodiments, Construct C5 is 4980 bp in length (SEQ ID NO: 117) and comprises the following elements in 5′ to 3′: 5′ AAV2-ITR (145 bp) (SEQ ID NO: 70), hTNNT2 promoter (544 bp) (SEQ ID NO: 52), chimeric intron (133 bp) (SEQ ID NO: 58), CpG free hMYBPC3 (SEQ ID NO: 45), mini poly A (57 bp) (SEQ ID NO: 64) and 3′ AAV2 ITR (145 bp) (SEQ ID NO: 74).

[0193] In some embodiments, Construct C5 is 4950 bp in length (SEQ ID NO: 118) and comprises the following elements in 5′ to 3′: 5′ AAV2-ITR (130 bp) (SEQ ID NO: 67), hTNNT2 promoter (544 bp) (SEQ ID NO: 52), chimeric intron (133 bp) (SEQ ID NO: 58), CpG free hMYBPC3 (SEQ ID NO: 45), mini poly A (57 bp) (SEQ ID NO: 64) and 3′ AAV2 ITR (130 bp) (SEQ ID NO: 73).

[0194] In some embodiments, Construct C5 is 4980 bp in length (SEQ ID NO: 119) and comprises the following elements in 5′ to 3′: 5′ AAV2-ITR (145 bp) (SEQ ID NO: 68), hTNNT2 promoter (544 bp) (SEQ ID NO: 52), chimeric intron (133 bp) (SEQ ID NO: 58), CpG free hMYBPC3 (SEQ ID NO: 45), mini poly A (57 bp) (SEQ ID NO: 64) and 3′ AAV2 ITR (145 bp) (SEQ ID NO: 74).

[0195] In some embodiments, Construct C5 is 4950 bp in length (SEQ ID NO: 120) and comprises the following elements in 5′ to 3′: 5′ AAV2-ITR (130 bp) (SEQ ID NO: 69), hTNNT2 promoter (544 bp) (SEQ ID NO: 52), chimeric intron (133 bp) (SEQ ID NO: 58), CpG free hMYBPC3 (SEQ ID NO: 45), mini poly A (57 bp) (SEQ ID NO: 64) and 3′ AAV2 ITR (130 bp) (SEQ ID NO: 71).

[0196] In some embodiments, Construct C5 is 4980 bp in length (SEQ ID NO: 121) and comprises the following elements in 5′ to 3′: 5′ AAV2-ITR (145 bp) (SEQ ID NO: 70), hTNNT2 promoter (544 bp) (SEQ ID NO: 52), chimeric intron (133 bp) (SEQ ID NO: 58), CpG free hMYBPC3 (SEQ ID NO: 45), mini poly A (57 bp) (SEQ ID NO: 64) and 3′ AAV2 ITR (145 bp) (SEQ ID NO: 72).

[0197] In some embodiments, Construct C5 is 4806 bp in length (SEQ ID NO: 39) and comprises the following elements in 5′ to 3′: hTNNT2 promoter (544 bp) (SEQ ID NO: 52), chimeric intron (133 bp) (SEQ ID NO: 58), CpG free hMYBPC3 (SEQ ID NO: 45), and mini poly A (57 bp) (SEQ ID NO: 64). In further embodiments, Construct C5 optionally comprises any of the 5′ AAV2-ITR sequences of SEQ ID NO: 67-70 (or the complement thereof) and/or any of the 3′ AAV2-ITR sequences of SEQ ID NO: 71-74 (or the complement thereof), or fragments thereof.

[0198] Construct A1 is 5074 bp in length (SEQ ID NO: 5) and comprises the following elements in 5′ to 3′: 5′ AAV2-ITR (130 bp) (SEQ ID NO: 67), hTNNT2 promoter (532 bp) (SEQ ID NO: 51), globin intron (131 bp) (SEQ ID NO: 53), HBB exon 3 (SEQ ID NO: 54); wild type hMYBPC3 (SEQ ID NO: 42), bGH poly A (227 bp) (SEQ ID NO: 61) and 3′ AAV2 ITR (130 bp) (SEQ ID NO: 71).

[0199] In some embodiments, Construct A1 is 5104 bp in length (SEQ ID NO: 4) and comprise the following elements in 5′ to 3′: 5′ AAV2-ITR (145 bp) (SEQ ID NO: 68), hTNNT2 promoter (532 bp) (SEQ ID NO: 51), globin intron (131 bp) (SEQ ID NO: 53), HBB exon 3 (SEQ ID NO: 54); wild type hMYBPC3 (SEQ ID NO: 42), bGH poly A (227 bp) (SEQ ID NO: 61) and 3′ AAV2 ITR (145 bp) (SEQ ID NO: 72);

[0200] In some embodiments, Construct A1 is 5074 bp in length (SEQ ID NO: 122) and comprise the following elements in 5′ to 3′: 5′ AAV2-ITR (130 bp) (SEQ ID NO: 69), hTNNT2 promoter (532 bp) (SEQ ID NO: 51), globin intron (131 bp) (SEQ ID NO: 53), HBB exon 3 (SEQ ID NO: 54); wild type hMYBPC3 (SEQ ID NO: 42), bGH poly A (227 bp) (SEQ ID NO: 61) and 3′ AAV2 ITR (130 bp) (SEQ ID NO: 73);

[0201] In some embodiments, Construct A1 is 5104 bp in length (SEQ ID NO: 123) and comprise the following elements in 5′ to 3′: 5′ AAV2-ITR (145 bp) (SEQ ID NO: 70), hTNNT2 promoter (532 bp) (SEQ ID NO: 51), globin intron (131 bp) (SEQ ID NO: 53), HBB exon 3 (SEQ ID NO: 54); wild type hMYBPC3 (SEQ ID NO: 42), bGH poly A (227 bp) (SEQ ID NO: 61) and 3′ AAV2 ITR (145 bp) (SEQ ID NO: 74);

[0202] In some embodiments, Construct A1 is 5074 bp in length (SEQ ID NO: 124) and comprise the following elements in 5′ to 3′: 5′ AAV2-ITR (130 bp) (SEQ ID NO: 67), hTNNT2 promoter (532 bp) (SEQ ID NO: 51), globin intron (131 bp) (SEQ ID NO: 53), HBB exon 3 (SEQ ID NO: 54); wild type hMYBPC3 (SEQ ID NO: 42), bGH poly A (227 bp) (SEQ ID NO: 61) and 3′ AAV2 ITR (130 bp) (SEQ ID NO: 73);

[0203] In some embodiments, Construct A1 is 5104 bp in length (SEQ ID NO: 125) and comprise the following elements in 5′ to 3′: 5′ AAV2-ITR (145 bp) (SEQ ID NO: 68), hTNNT2 promoter (532 bp) (SEQ ID NO: 51), globin intron (131 bp) (SEQ ID NO: 53), HBB exon 3 (SEQ ID NO: 54); wild type hMYBPC3 (SEQ ID NO: 42), bGH poly A (227 bp) (SEQ ID NO: 61) and 3′ AAV2 ITR (145 bp) (SEQ ID NO: 74);

[0204] In some embodiments, Construct A1 is 5074 bp in length (SEQ ID NO: 126) and comprise the following elements in 5′ to 3′: 5′ AAV2-ITR (130 bp) (SEQ ID NO: 69), hTNNT2 promoter (532 bp) (SEQ ID NO: 51), globin intron (131 bp) (SEQ ID NO: 53), HBB exon 3 (SEQ ID NO: 54); wild type hMYBPC3 (SEQ ID NO: 42), bGH poly A (227 bp) (SEQ ID NO: 61) and 3′ AAV2 ITR (130 bp) (SEQ ID NO: 71);

[0205] In some embodiments, Construct A1 is 5104 bp in length (SEQ ID NO: 127) and comprise the following elements in 5′ to 3′: 5′ AAV2-ITR (145 bp) (SEQ ID NO: 70), hTNNT2 promoter (532 bp) (SEQ ID NO: 51), globin intron (131 bp) (SEQ ID NO: 53), HBB exon 3 (SEQ ID NO: 54); wild type hMYBPC3 (SEQ ID NO: 42), bGH poly A (227 bp) (SEQ ID NO: 61) and 3′ AAV2 ITR (145 bp) (SEQ ID NO: 72).

[0206] In some embodiments, Construct A1 is 4786 bp in length (SEQ ID NO: 3) and comprise the following elements in 5′ to 3′: hTNNT2 promoter (532 bp) (SEQ ID NO: 51), globin intron (131 bp) (SEQ ID NO: 53), HBB exon 3 (SEQ ID NO: 54); wild type hMYBPC3 (SEQ ID NO: 42), and bGH poly A (227 bp) (SEQ ID NO: 61). In further embodiments, Construct A1 optionally comprises any of the 5′ AAV2-ITR sequences of SEQ ID NO: 67-70 (or the complement thereof) and/or any of the 3′ AAV2-ITR sequences of SEQ ID NO: 71-74 (or the complement thereof), or fragments thereof.

[0207] Construct A2 is 4939 bp in length (SEQ ID NO: 8) and comprises the following elements in 5′ to 3′: 5′ AAV2-ITR (130 bp) (SEQ ID NO: 67), hTNNT2 promoter (469 bp) (SEQ ID NO: 49), wild type hMYBPC3 (SEQ ID NO: 42) with globin intron (131 bp) (SEQ ID NO: 53) between exons, bGH poly A (227 bp) (SEQ ID NO: 61) and 3′ AAV2 ITR (130 bp) (SEQ ID NO: 71).

[0208] In some embodiments, Construct A2 is 4969 bp in length (SEQ ID NO: 7) and comprises the following elements in 5′ to 3′: 5′ AAV2-ITR (145 bp) (SEQ ID NO: 68), hTNNT2 promoter (469 bp) (SEQ ID NO: 49), wild type hMYBPC3 (SEQ ID NO: 42) with globin intron (131 bp) (SEQ ID NO: 53) between exons, bGH poly A (227 bp) (SEQ ID NO: 61) and 3′ AAV2 ITR (145 bp) (SEQ ID NO: 72).

[0209] In some embodiments, Construct A2 is 4939 bp in length (SEQ ID NO: 128) and comprises the following elements in 5′ to 3′: 5′ AAV2-ITR (130 bp) (SEQ ID NO: 69), hTNNT2 promoter (469 bp) (SEQ ID NO: 49), wild type hMYBPC3 (SEQ ID NO: 42) with globin intron (131 bp) (SEQ ID NO: 53) between exons, bGH poly A (227 bp) (SEQ ID NO: 61) and 3′ AAV2 ITR (130 bp) (SEQ ID NO: 73).

[0210] In some embodiments, Construct A2 is 4969 bp in length (SEQ ID NO: 129) and comprises the following elements in 5′ to 3′: 5′ AAV2-ITR (145 bp) (SEQ ID NO: 70), hTNNT2 promoter (469 bp) (SEQ ID NO: 49), wild type hMYBPC3 (SEQ ID NO: 42) with globin intron (131 bp) (SEQ ID NO: 53) between exons, bGH poly A (227 bp) (SEQ ID NO: 61) and 3′ AAV2 ITR (145 bp) (SEQ ID NO: 74).

[0211] In some embodiments, Construct A2 is 4939 bp in length (SEQ ID NO: 130) and comprises the following elements in 5′ to 3′: 5′ AAV2-ITR (130 bp) (SEQ ID NO: 67), hTNNT2 promoter (469 bp) (SEQ ID NO: 49), wild type hMYBPC3 (SEQ ID NO: 42) with globin intron (131 bp) (SEQ ID NO: 53) between exons, bGH poly A (227 bp) (SEQ ID NO: 61) and 3′ AAV2 ITR (130 bp) (SEQ ID NO: 73).

[0212] In some embodiments, Construct A2 is 4969 bp in length (SEQ ID NO: 131) and comprises the following elements in 5′ to 3′: 5′ AAV2-ITR (145 bp) (SEQ ID NO: 68), hTNNT2 promoter (469 bp) (SEQ ID NO: 49), wild type hMYBPC3 (SEQ ID NO: 42) with globin intron (131 bp) (SEQ ID NO: 53) between exons, bGH poly A (227 bp) (SEQ ID NO: 61) and 3′ AAV2 ITR (145 bp) (SEQ ID NO: 74).

[0213] In some embodiments, Construct A2 is 4939 bp in length (SEQ ID NO: 132) and comprises the following elements in 5′ to 3′: 5′ AAV2-ITR (130 bp) (SEQ ID NO: 69), hTNNT2 promoter (469 bp) (SEQ ID NO: 49), wild type hMYBPC3 (SEQ ID NO: 42) with globin intron (131 bp) (SEQ ID NO: 53) between exons, bGH poly A (227 bp) (SEQ ID NO: 61) and 3′ AAV2 ITR (130 bp) (SEQ ID NO: 71).

[0214] In some embodiments, Construct A2 is 4969 bp in length (SEQ ID NO: 133) and comprises the following elements in 5′ to 3′: 5′ AAV2-ITR (145 bp) (SEQ ID NO: 70), hTNNT2 promoter (469 bp) (SEQ ID NO: 49), wild type hMYBPC3 (SEQ ID NO: 42) with globin intron (131 bp) (SEQ ID NO: 53) between exons, bGH poly A (227 bp) (SEQ ID NO: 61) and 3′ AAV2 ITR (145 bp) (SEQ ID NO: 72).

[0215] In some embodiments, Construct A2 is 4663 bp in length (SEQ ID NO: 6) and comprises the following elements in 5′ to 3′: hTNNT2 promoter (469 bp) (SEQ ID NO: 49), wild type hMYBPC3 (SEQ ID NO: 42) with globin intron (131 bp) (SEQ ID NO: 53) between exons, and bGH poly A (227 bp) (SEQ ID NO: 61). In further embodiments, Construct A2 optionally comprises any of the 5′ AAV2-ITR sequences of SEQ ID NO: 67-70 (or the complement thereof) and/or any of the 3′ AAV2-ITR sequences of SEQ ID NO: 71-74 (or the complement thereof), or fragments thereof.

[0216] Construct A3 is 4939 bp in length (SEQ ID NO: 11) and comprises the following elements in 5′ to 3′: 5′ AAV2-ITR (130 bp) (SEQ ID NO: 67), hTNNT2 promoter (532 bp) (SEQ ID NO: 51), wild type hMYBPC3 (SEQ ID NO: 42) with globin intron (131 bp) (SEQ ID NO: 53) between exons, bGH poly A (169 bp) (SEQ ID NO: 59) and 3′ AAV2 ITR (130 bp) (SEQ ID NO: 71).

[0217] In some embodiments, Construct A3 is 4969 bp in length (SEQ ID NO: 10) and comprises the following elements in 5′ to 3′: 5′ AAV2-ITR (145 bp) (SEQ ID NO: 68), hTNNT2 promoter (532 bp) (SEQ ID NO: 51), wild type hMYBPC3 (SEQ ID NO: 42) with globin intron (131 bp) (SEQ ID NO: 53) between exons, bGH poly A (169 bp) (SEQ ID NO: 59) and 3′ AAV2 ITR (145) (SEQ ID NO: 72).

[0218] In some embodiments, Construct A3 is 4939 bp in length (SEQ ID NO: 134) and comprises the following elements in 5′ to 3′: 5′ AAV2-ITR (130 bp) (SEQ ID NO: 69), hTNNT2 promoter (532 bp) (SEQ ID NO: 51), wild type hMYBPC3 (SEQ ID NO: 42) with globin intron (131 bp) (SEQ ID NO: 53) between exons, bGH poly A (169 bp) (SEQ ID NO: 59) and 3′ AAV2 ITR (130 bp) (SEQ ID NO: 73).

[0219] In some embodiments, Construct A3 is 4969 bp in length (SEQ ID NO: 135) and comprises the following elements in 5′ to 3′: 5′ AAV2-ITR (145 bp) (SEQ ID NO: 70), hTNNT2 promoter (532 bp) (SEQ ID NO: 51), wild type hMYBPC3 (SEQ ID NO: 42) with globin intron (131 bp) (SEQ ID NO: 53) between exons, bGH poly A (169 bp) (SEQ ID NO: 59) and 3′ AAV2 ITR (145) (SEQ ID NO: 74).

[0220] In some embodiments, Construct A3 is 4939 bp in length (SEQ ID NO: 136) and comprises the following elements in 5′ to 3′: 5′ AAV2-ITR (130 bp) (SEQ ID NO: 67), hTNNT2 promoter (532 bp) (SEQ ID NO: 51), wild type hMYBPC3 (SEQ ID NO: 42) with globin intron (131 bp) (SEQ ID NO: 53) between exons, bGH poly A (169 bp) (SEQ ID NO: 59) and 3′ AAV2 ITR (130 bp) (SEQ ID NO: 73).

[0221] In some embodiments, Construct A3 is 4969 bp in length (SEQ ID NO: 137) and comprises the following elements in 5′ to 3′: 5′ AAV2-ITR (145 bp) (SEQ ID NO: 68), hTNNT2 promoter (532 bp) (SEQ ID NO: 51), wild type hMYBPC3 (SEQ ID NO: 42) with globin intron (131 bp) (SEQ ID NO: 53) between exons, bGH poly A (169 bp) (SEQ ID NO: 59) and 3′ AAV2 ITR (145) (SEQ ID NO: 74).

[0222] In some embodiments, Construct A3 is 4939 bp in length (SEQ ID NO: 138) and comprises the following elements in 5′ to 3′: 5′ AAV2-ITR (130 bp) (SEQ ID NO: 69), hTNNT2 promoter (532 bp) (SEQ ID NO: 51), wild type hMYBPC3 (SEQ ID NO: 42) with globin intron (131 bp) (SEQ ID NO: 53) between exons, bGH poly A (169 bp) (SEQ ID NO: 59) and 3′ AAV2 ITR (130 bp) (SEQ ID NO: 71).

[0223] In some embodiments, Construct A3 is 4969 bp in length (SEQ ID NO: 139) and comprises the following elements in 5′ to 3′: 5′ AAV2-ITR (145 bp) (SEQ ID NO: 70), hTNNT2 promoter (532 bp) (SEQ ID NO: 51), wild type hMYBPC3 (SEQ ID NO: 42) with globin intron (131 bp) (SEQ ID NO: 53) between exons, bGH poly A (169 bp) (SEQ ID NO: 59) and 3′ AAV2 ITR (145) (SEQ ID NO: 72).

[0224] In some embodiments, Construct A3 is 4663 bp in length (SEQ ID NO: 9) and comprises the following elements in 5′ to 3′: hTNNT2 promoter (532 bp) (SEQ ID NO: 51), wild type hMYBPC3 (SEQ ID NO: 42) with globin intron (131 bp) (SEQ ID NO: 53) between exons, and bGH poly A (169 bp) (SEQ ID NO: 59). In further embodiments, Construct A3 optionally comprises any of the 5′ AAV2-ITR sequences of SEQ ID NO: 67-70 (or the complement thereof) and/or any of the 3′ AAV2-ITR sequences of SEQ ID NO: 71-74 (or the complement thereof), or fragments thereof.

[0225] Construct A4 is 4939 bp in length (SEQ ID NO: 14) and comprises the following elements in 5′ to 3′: 5′ AAV2-ITR (130 bp) (SEQ ID NO: 67), hTNNT2 promoter (499 bp) (SEQ ID NO: 50), wild type hMYBPC3 (SEQ ID NO: 42) with globin intron (131 bp) (SEQ ID NO: 53) between exons, bGH poly A (202 bp) (SEQ ID NO: 60) and 3′ AAV2 ITR (130 bp) (SEQ ID NO: 71).

[0226] In some embodiments, Construct A4 is 4969 bp in length (SEQ ID NO: 13) and comprises the following elements in 5′ to 3′: 5′ AAV2-ITR (145 bp) (SEQ ID NO: 68), hTNNT2 promoter (499 bp) (SEQ ID NO: 50), wild type hMYBPC3 (SEQ ID NO: 42) with globin intron (131 bp) (SEQ ID NO: 53) between exons, bGH poly A (202 bp) (SEQ ID NO: 60) and 3′ AAV2 ITR (145 bp) (SEQ ID NO: 72).

[0227] In some embodiments, Construct A4 is 4939 bp in length (SEQ ID NO: 140) and comprises the following elements in 5′ to 3′: 5′ AAV2-ITR (130 bp) (SEQ ID NO: 69), hTNNT2 promoter (499 bp) (SEQ ID NO: 50), wild type hMYBPC3 (SEQ ID NO: 42) with globin intron (131 bp) (SEQ ID NO: 53) between exons, bGH poly A (202 bp) (SEQ ID NO: 60) and 3′ AAV2 ITR (130 bp) (SEQ ID NO: 73).

[0228] In some embodiments, Construct A4 is 4969 bp in length (SEQ ID NO: 141) and comprises the following elements in 5′ to 3′: 5′ AAV2-ITR (145 bp) (SEQ ID NO: 70), hTNNT2 promoter (499 bp) (SEQ ID NO: 50), wild type hMYBPC3 (SEQ ID NO: 42) with globin intron (131 bp) (SEQ ID NO: 53) between exons, bGH poly A (202 bp) (SEQ ID NO: 60) and 3′ AAV2 ITR (145 bp) (SEQ ID NO: 74).

[0229] In some embodiments, Construct A4 is 4939 bp in length (SEQ ID NO: 142) and comprises the following elements in 5′ to 3′: 5′ AAV2-ITR (130 bp) (SEQ ID NO: 67), hTNNT2 promoter (499 bp) (SEQ ID NO: 50), wild type hMYBPC3 (SEQ ID NO: 42) with globin intron (131 bp) (SEQ ID NO: 53) between exons, bGH poly A (202 bp) (SEQ ID NO: 60) and 3′ AAV2 ITR (130 bp) (SEQ ID NO: 73).

[0230] In some embodiments, Construct A4 is 4969 bp in length (SEQ ID NO: 143) and comprises the following elements in 5′ to 3′: 5′ AAV2-ITR (145 bp) (SEQ ID NO: 68), hTNNT2 promoter (499 bp) (SEQ ID NO: 50), wild type hMYBPC3 (SEQ ID NO: 42) with globin intron (131 bp) (SEQ ID NO: 53) between exons, bGH poly A (202 bp) (SEQ ID NO: 60) and 3′ AAV2 ITR (145 bp) (SEQ ID NO: 74).

[0231] In some embodiments, Construct A4 is 4939 bp in length (SEQ ID NO: 144) and comprises the following elements in 5′ to 3′: 5′ AAV2-ITR (130 bp) (SEQ ID NO: 69), hTNNT2 promoter (499 bp) (SEQ ID NO: 50), wild type hMYBPC3 (SEQ ID NO: 42) with globin intron (131 bp) (SEQ ID NO: 53) between exons, bGH poly A (202 bp) (SEQ ID NO: 60) and 3′ AAV2 ITR (130 bp) (SEQ ID NO: 71).

[0232] In some embodiments, Construct A4 is 4969 bp in length (SEQ ID NO: 145) and comprises the following elements in 5′ to 3′: 5′ AAV2-ITR (145 bp) (SEQ ID NO: 70), hTNNT2 promoter (499 bp) (SEQ ID NO: 50), wild type hMYBPC3 (SEQ ID NO: 42) with globin intron (131 bp) (SEQ ID NO: 53) between exons, bGH poly A (202 bp) (SEQ ID NO: 60) and 3′ AAV2 ITR (145 bp) (SEQ ID NO: 72).

[0233] In some embodiments, Construct A4 is 4663 bp in length (SEQ ID NO: 12) and comprises the following elements in 5′ to 3′: hTNNT2 promoter (499 bp) (SEQ ID NO: 50), wild type hMYBPC3 (SEQ ID NO: 42) with globin intron (131 bp) (SEQ ID NO: 53) between exons, and bGH poly A (202 bp) (SEQ ID NO: 60). In further embodiments, Construct A4 optionally comprises any of the 5′ AAV2-ITR sequences of SEQ ID NO: 67-70 (or the complement thereof) and/or any of the 3′ AAV2-ITR sequences of SEQ ID NO: 71-74 (or the complement thereof), or fragments thereof.

[0234] Construct A5 is 4871 bp in length (SEQ ID NO: 17) and comprises the following elements in 5′ to 3′: 5′ AAV2-ITR (130 bp) (SEQ ID NO: 67), hTNNT2 promoter (532 bp) (SEQ ID NO: 51), wild type hMYBPC3 (SEQ ID NO: 42), bGH poly A (227 bp) (SEQ ID NO: 61) and 3′ AAV2 ITR (130 bp) (SEQ ID NO: 71).

[0235] In some embodiments, Construct A5 is 4901 bp in length (SEQ ID NO: 16) and comprises the following elements in 5′ to 3′: 5′ AAV2-ITR (145 bp) (SEQ ID NO: 67), hTNNT2 promoter (532 bp) (SEQ ID NO: 51), wild type hMYBPC3 (SEQ ID NO: 42), bGH poly A (227 bp) (SEQ ID NO: 61) and 3′ AAV2 ITR (145 bp) (SEQ ID NO: 71).

[0236] In some embodiments, Construct A5 is 4871 bp in length (SEQ ID NO: 146) and comprises the following elements in 5′ to 3′: 5′ AAV2-ITR (130 bp) (SEQ ID NO: 69), hTNNT2 promoter (532 bp) (SEQ ID NO: 51), wild type hMYBPC3 (SEQ ID NO: 42), bGH poly A (227 bp) (SEQ ID NO: 61) and 3′ AAV2 ITR (130 bp) (SEQ ID NO: 73).

[0237] In some embodiments, Construct A5 is 4901 bp in length (SEQ ID NO: 147) and comprises the following elements in 5′ to 3′: 5′ AAV2-ITR (145 bp) (SEQ ID NO: 70), hTNNT2 promoter (532 bp) (SEQ ID NO: 51), wild type hMYBPC3 (SEQ ID NO: 42), bGH poly A (227 bp) (SEQ ID NO: 61) and 3′ AAV2 ITR (145 bp) (SEQ ID NO: 74).

[0238] In some embodiments, Construct A5 is 4871 bp in length (SEQ ID NO: 148) and comprises the following elements in 5′ to 3′: 5′ AAV2-ITR (130 bp) (SEQ ID NO: 67), hTNNT2 promoter (532 bp) (SEQ ID NO: 51), wild type hMYBPC3 (SEQ ID NO: 42), bGH poly A (227 bp) (SEQ ID NO: 61) and 3′ AAV2 ITR (130 bp) (SEQ ID NO: 73).

[0239] In some embodiments, Construct A5 is 4901 bp in length (SEQ ID NO: 149) and comprises the following elements in 5′ to 3′: 5′ AAV2-ITR (145 bp) (SEQ ID NO: 68), hTNNT2 promoter (532 bp) (SEQ ID NO: 51), wild type hMYBPC3 (SEQ ID NO: 42), bGH poly A (227 bp) (SEQ ID NO: 61) and 3′ AAV2 ITR (145 bp) (SEQ ID NO: 74).

[0240] In some embodiments, Construct A5 is 4871 bp in length (SEQ ID NO: 150) and comprises the following elements in 5′ to 3′: 5′ AAV2-ITR (130 bp) (SEQ ID NO: 69), hTNNT2 promoter (532 bp) (SEQ ID NO: 51), wild type hMYBPC3 (SEQ ID NO: 42), bGH poly A (227 bp) (SEQ ID NO: 61) and 3′ AAV2 ITR (130 bp) (SEQ ID NO: 71).

[0241] In some embodiments, Construct A5 is 4901 bp in length (SEQ ID NO: 151) and comprises the following elements in 5′ to 3′: 5′ AAV2-ITR (145 bp) (SEQ ID NO: 70), hTNNT2 promoter (532 bp) (SEQ ID NO: 51), wild type hMYBPC3 (SEQ ID NO: 42), bGH poly A (227 bp) (SEQ ID NO: 61) and 3′ AAV2 ITR (145 bp) (SEQ ID NO: 72).

[0242] In some embodiments, Construct A5 is 4595 bp in length (SEQ ID NO: 15) and comprises the following elements in 5′ to 3′: hTNNT2 promoter (532 bp) (SEQ ID NO: 51), wild type hMYBPC3 (SEQ ID NO: 42), and bGH poly A (227 bp) (SEQ ID NO: 61). In further embodiments, Construct A5 optionally comprises any of the 5′ AAV2-ITR sequences of SEQ ID NO: 67-70 (or the complement thereof) and/or any of the 3′ AAV2-ITR sequences of SEQ ID NO: 71-74 (or the complement thereof), or fragments thereof.

[0243] Construct A6 is 5002 bp in length (SEQ ID NO: 20) and comprises the following elements in 5′ to 3′: 5′ AAV2-ITR (130 bp) (SEQ ID NO: 67), hTNNT2 promoter (532 bp) (SEQ ID NO: 51), wild type hMYBPC3 (SEQ ID NO: 42) with globin intron (131 bp) (SEQ ID NO: 53) between exons, bGH poly A (227 bp) (SEQ ID NO: 61) and 3′ AAV2 ITR (130 bp) (SEQ ID NO: 71).

[0244] In some embodiments, Construct A6 is 5032 bp in length (SEQ ID NO: 19) and comprises the following elements in 5′ to 3′: 5′ AAV2-ITR (145 bp) (SEQ ID NO: 68), hTNNT2 promoter (532 bp) (SEQ ID NO: 51), wild type hMYBPC3 (SEQ ID NO: 42) with globin intron (131 bp) (SEQ ID NO: 53) between exons, bGH poly A (227 bp) (SEQ ID NO: 61) and 3′ AAV2 ITR (145 bp) (SEQ ID NO: 72).

[0245] In some embodiments, Construct A6 is 5002 bp in length (SEQ ID NO: 152) and comprises the following elements in 5′ to 3′: 5′ AAV2-ITR (130 bp) (SEQ ID NO: 69), hTNNT2 promoter (532 bp) (SEQ ID NO: 51), wild type hMYBPC3 (SEQ ID NO: 42) with globin intron (131 bp) (SEQ ID NO: 53) between exons, bGH poly A (227 bp) (SEQ ID NO: 61) and 3′ AAV2 ITR (130 bp) (SEQ ID NO: 73).

[0246] In some embodiments, Construct A6 is 5032 bp in length (SEQ ID NO: 153) and comprises the following elements in 5′ to 3′: 5′ AAV2-ITR (145 bp) (SEQ ID NO: 70), hTNNT2 promoter (532 bp) (SEQ ID NO: 51), wild type hMYBPC3 (SEQ ID NO: 42) with globin intron (131 bp) (SEQ ID NO: 53) between exons, bGH poly A (227 bp) (SEQ ID NO: 61) and 3′ AAV2 ITR (145 bp) (SEQ ID NO: 74).

[0247] In some embodiments, Construct A6 is 5002 bp in length (SEQ ID NO: 154) and comprises the following elements in 5′ to 3′: 5′ AAV2-ITR (130 bp) (SEQ ID NO: 67), hTNNT2 promoter (532 bp) (SEQ ID NO: 51), wild type hMYBPC3 (SEQ ID NO: 42) with globin intron (131 bp) (SEQ ID NO: 53) between exons, bGH poly A (227 bp) (SEQ ID NO: 61) and 3′ AAV2 ITR (130 bp) (SEQ ID NO: 73).

[0248] In some embodiments, Construct A6 is 5032 bp in length (SEQ ID NO: 155) and comprises the following elements in 5′ to 3′: 5′ AAV2-ITR (145 bp) (SEQ ID NO: 68), hTNNT2 promoter (532 bp) (SEQ ID NO: 51), wild type hMYBPC3 (SEQ ID NO: 42) with globin intron (131 bp) (SEQ ID NO: 53) between exons, bGH poly A (227 bp) (SEQ ID NO: 61) and 3′ AAV2 ITR (145 bp) (SEQ ID NO: 74).

[0249] In some embodiments, Construct A6 is 5002 bp in length (SEQ ID NO: 156) and comprises the following elements in 5′ to 3′: 5′ AAV2-ITR (130 bp) (SEQ ID NO: 69), hTNNT2 promoter (532 bp) (SEQ ID NO: 51), wild type hMYBPC3 (SEQ ID NO: 42) with globin intron (131 bp) (SEQ ID NO: 53) between exons, bGH poly A (227 bp) (SEQ ID NO: 61) and 3′ AAV2 ITR (130 bp) (SEQ ID NO: 71).

[0250] In some embodiments, Construct A6 is 5032 bp in length (SEQ ID NO: 157) and comprises the following elements in 5′ to 3′: 5′ AAV2-ITR (145 bp) (SEQ ID NO: 70), hTNNT2 promoter (532 bp) (SEQ ID NO: 51), wild type hMYBPC3 (SEQ ID NO: 42) with globin intron (131 bp) (SEQ ID NO: 53) between exons, bGH poly A (227 bp) (SEQ ID NO: 61) and 3′ AAV2 ITR (145 bp) (SEQ ID NO: 72).

[0251] In some embodiments, Construct A6 is 4726 bp in length (SEQ ID NO: 18) and comprises the following elements in 5′ to 3′: hTNNT2 promoter (532 bp) (SEQ ID NO: 51), wild type hMYBPC3 (SEQ ID NO: 42) with globin intron (131 bp) (SEQ ID NO: 53) between exons, and bGH poly A (227 bp) (SEQ ID NO: 61). In further embodiments, Construct A6 optionally comprises any of the 5′ AAV2-ITR sequences of SEQ ID NO: 67-70 (or the complement thereof) and/or any of the 3′ AAV2-ITR sequences of SEQ ID NO: 71-74 (or the complement thereof), or fragments thereof.

[0252] Construct A7 is 4781 bp in length (SEQ ID NO: 23) and comprises the following elements in 5′ to 3′: 5′ AAV2-ITR (130 bp) (SEQ ID NO: 67), hTNNT2 promoter (469 bp) (SEQ ID NO: 49), Kozac sequence, wild type hMYBPC3 (SEQ ID NO: 42) with globin intron (131 bp) (SEQ ID NO: 53) between exons, mini poly A (57 bp) (SEQ ID NO: 64), 3′-UTR sequence and 3′ AAV2-ITR (130 bp) (SEQ ID NO: 71).

[0253] In some embodiments, Construct A7 is 4811 bp in length (SEQ ID NO: 22) and comprises the following elements in 5′ to 3′: 5′ AAV2-ITR (145 bp) (SEQ ID NO: 67), hTNNT2 promoter (469 bp) (SEQ ID NO: 49), Kozac sequence, wild type hMYBPC3 (SEQ ID NO: 42) with globin intron (131 bp) (SEQ ID NO: 53) between exons, mini poly A (57 bp) (SEQ ID NO: 64), 3′-UTR sequence and 3′ AAV2-ITR (145 bp) (SEQ ID NO: 71).

[0254] In some embodiments, Construct A7 is 4781 bp in length (SEQ ID NO: 158) and comprises the following elements in 5′ to 3′: 5′ AAV2-ITR (130 bp) (SEQ ID NO: 69), hTNNT2 promoter (469 bp) (SEQ ID NO: 49), Kozac sequence, wild type hMYBPC3 (SEQ ID NO: 42) with globin intron (131 bp) (SEQ ID NO: 53) between exons, mini poly A (57 bp) (SEQ ID NO: 64), 3′-UTR sequence and 3′ AAV2-ITR (130 bp) (SEQ ID NO: 73).

[0255] In some embodiments, Construct A7 is 4811 bp in length (SEQ ID NO: 159) and comprises the following elements in 5′ to 3′: 5′ AAV2-ITR (145 bp) (SEQ ID NO: 70), hTNNT2 promoter (469 bp) (SEQ ID NO: 49), Kozac sequence, wild type hMYBPC3 (SEQ ID NO: 42) with globin intron (131 bp) (SEQ ID NO: 53) between exons, mini poly A (57 bp) (SEQ ID NO: 64), 3′-UTR sequence and 3′ AAV2-ITR (145 bp) (SEQ ID NO: 74).

[0256] In some embodiments, Construct A7 is 4781 bp in length (SEQ ID NO: 160) and comprises the following elements in 5′ to 3′: 5′ AAV2-ITR (130 bp) (SEQ ID NO: 67), hTNNT2 promoter (469 bp) (SEQ ID NO: 49), Kozac sequence, wild type hMYBPC3 (SEQ ID NO: 42) with globin intron (131 bp) (SEQ ID NO: 53) between exons, mini poly A (57 bp) (SEQ ID NO: 64), 3′-UTR sequence and 3′ AAV2-ITR (130 bp) (SEQ ID NO: 73).

[0257] In some embodiments, Construct A7 is 4811 bp in length (SEQ ID NO: 161) and comprises the following elements in 5′ to 3′: 5′ AAV2-ITR (145 bp) (SEQ ID NO: 68), hTNNT2 promoter (469 bp) (SEQ ID NO: 49), Kozac sequence, wild type hMYBPC3 (SEQ ID NO: 42) with globin intron (131 bp) (SEQ ID NO: 53) between exons, mini poly A (57 bp) (SEQ ID NO: 64), 3′-UTR sequence and 3′ AAV2-ITR (145 bp) (SEQ ID NO: 74).

[0258] In some embodiments, Construct A7 is 4781 bp in length (SEQ ID NO: 162) and comprises the following elements in 5′ to 3′: 5′ AAV2-ITR (130 bp) (SEQ ID NO: 69), hTNNT2 promoter (469 bp) (SEQ ID NO: 49), Kozac sequence, wild type hMYBPC3 (SEQ ID NO: 42) with globin intron (131 bp) (SEQ ID NO: 53) between exons, mini poly A (57 bp) (SEQ ID NO: 64), 3′-UTR sequence and 3′ AAV2-ITR (130 bp) (SEQ ID NO: 71).

[0259] In some embodiments, Construct A7 is 4811 bp in length (SEQ ID NO: 163) and comprises the following elements in 5′ to 3′: 5′ AAV2-ITR (145 bp) (SEQ ID NO: 70), hTNNT2 promoter (469 bp) (SEQ ID NO: 49), Kozac sequence, wild type hMYBPC3 (SEQ ID NO: 42) with globin intron (131 bp) (SEQ ID NO: 53) between exons, mini poly A (57 bp) (SEQ ID NO: 64), 3′-UTR sequence and 3′ AAV2-ITR (145 bp) (SEQ ID NO: 72).

[0260] In some embodiments, Construct A7 is 4505 bp in length (SEQ ID NO: 21) and comprises the following elements in 5′ to 3′: hTNNT2 promoter (469 bp) (SEQ ID NO: 49), Kozac sequence, wild type hMYBPC3 (SEQ ID NO: 42) with globin intron (131 bp) (SEQ ID NO: 53) between exons, mini poly A (57 bp) (SEQ ID NO: 64), and 3′-UTR sequence. In further embodiments, Construct A7 optionally comprises any of the 5′ AAV2-ITR sequences of SEQ ID NO: 67-70 (or the complement thereof) and/or any of the 3′ AAV2-ITR sequences of SEQ ID NO: 71-74 (or the complement thereof), or fragments thereof.

[0261] Construct A8 is 4844 bp in length (SEQ ID NO: 26) and comprises the following elements in 5′ to 3′: 5′ AAV2-ITR (130 bp) (SEQ ID NO: 67), hTNNT2 promoter (532 bp) (SEQ ID NO: 51), Kozac sequence, wild type hMYBPC3 (SEQ ID NO: 42) with globin intron (131 bp) (SEQ ID NO: 53) between exons, mini poly A (57 bp) (SEQ ID NO: 64), 3′-UTR sequence and 3′ AAV2-ITR (130 bp) (SEQ ID NO: 71).

[0262] In some embodiments, Construct A8 is 4874 bp in length (SEQ ID NO: 25) and comprises the following elements in 5′ to 3′: 5′ AAV2-ITR (145 bp) (SEQ ID NO: 67), hTNNT2 promoter (532 bp) (SEQ ID NO: 51), Kozac sequence, wild type hMYBPC3 (SEQ ID NO: 42) with globin intron (131 bp) (SEQ ID NO: 53) between exons, mini poly A (57 bp) (SEQ ID NO: 64), 3′-UTR sequence and 3′ AAV2-ITR (145 bp) (SEQ ID NO: 71).

[0263] In some embodiments, Construct A8 is 4844 bp in length (SEQ ID NO: 164) and comprises the following elements in 5′ to 3′: 5′ AAV2-ITR (130 bp) (SEQ ID NO: 69), hTNNT2 promoter (532 bp) (SEQ ID NO: 51), Kozac sequence, wild type hMYBPC3 (SEQ ID NO: 42) with globin intron (131 bp) (SEQ ID NO: 53) between exons, mini poly A (57 bp) (SEQ ID NO: 64), 3′-UTR sequence and 3′ AAV2-ITR (130 bp) (SEQ ID NO: 73).

[0264] In some embodiments, Construct A8 is 4874 bp in length (SEQ ID NO: 165) and comprises the following elements in 5′ to 3′: 5′ AAV2-ITR (145 bp) (SEQ ID NO: 70), hTNNT2 promoter (532 bp) (SEQ ID NO: 51), Kozac sequence, wild type hMYBPC3 (SEQ ID NO: 42) with globin intron (131 bp) (SEQ ID NO: 53) between exons, mini poly A (57 bp) (SEQ ID NO: 64), 3′-UTR sequence and 3′ AAV2-ITR (145 bp) (SEQ ID NO: 72).

[0265] In some embodiments, Construct A8 is 4844 bp in length (SEQ ID NO: 166) and comprises the following elements in 5′ to 3′: 5′ AAV2-ITR (130 bp) (SEQ ID NO: 67), hTNNT2 promoter (532 bp) (SEQ ID NO: 51), Kozac sequence, wild type hMYBPC3 (SEQ ID NO: 42) with globin intron (131 bp) (SEQ ID NO: 53) between exons, mini poly A (57 bp) (SEQ ID NO: 64), 3′-UTR sequence and 3′ AAV2-ITR (130 bp) (SEQ ID NO: 73).

[0266] In some embodiments, Construct A8 is 4874 bp in length (SEQ ID NO: 167) and comprises the following elements in 5′ to 3′: 5′ AAV2-ITR (145 bp) (SEQ ID NO: 68), hTNNT2 promoter (532 bp) (SEQ ID NO: 51), Kozac sequence, wild type hMYBPC3 (SEQ ID NO: 42) with globin intron (131 bp) (SEQ ID NO: 53) between exons, mini poly A (57 bp) (SEQ ID NO: 64), 3′-UTR sequence and 3′ AAV2-ITR (145 bp) (SEQ ID NO: 73).

[0267] In some embodiments, Construct A8 is 4844 bp in length (SEQ ID NO: 168) and comprises the following elements in 5′ to 3′: 5′ AAV2-ITR (130 bp) (SEQ ID NO: 69), hTNNT2 promoter (532 bp) (SEQ ID NO: 51), Kozac sequence, wild type hMYBPC3 (SEQ ID NO: 42) with globin intron (131 bp) (SEQ ID NO: 53) between exons, mini poly A (57 bp) (SEQ ID NO: 64), 3′-UTR sequence and 3′ AAV2-ITR (130 bp) (SEQ ID NO: 71).

[0268] In some embodiments, Construct A8 is 4874 bp in length (SEQ ID NO: 169) and comprises the following elements in 5′ to 3′: 5′ AAV2-ITR (145 bp) (SEQ ID NO: 70), hTNNT2 promoter (532 bp) (SEQ ID NO: 51), Kozac sequence, wild type hMYBPC3 (SEQ ID NO: 42) with globin intron (131 bp) (SEQ ID NO: 53) between exons, mini poly A (57 bp) (SEQ ID NO: 64), 3′-UTR sequence and 3′ AAV2-ITR (145 bp) (SEQ ID NO: 72).

[0269] In some embodiments, Construct A8 is 4568 bp in length (SEQ ID NO: 24) and comprises the following elements in 5′ to 3′: hTNNT2 promoter (532 bp) (SEQ ID NO: 51), Kozac sequence, wild type hMYBPC3 (SEQ ID NO: 42) with globin intron (131 bp) (SEQ ID NO: 53) between exons, mini poly A (57 bp) (SEQ ID NO: 64), and 3′-UTR sequence. In further embodiments, Construct A8 optionally comprises any of the 5′ AAV2-ITR sequences of SEQ ID NO: 67-70 (or the complement thereof) and/or any of the 3′ AAV2-ITR sequences of SEQ ID NO: 71-74 (or the complement thereof), or fragments thereof.

[0270] In any of the foregoing embodiments, the vector construct comprises at least one ITR sequence. Example ITR sequences include but are not limited to SEQ ID Nos: 67-74 including any complementary sequences and/or combinations thereof.

[0271] Polynucleotides and polypeptides including modified forms can be made using various standard cloning, recombinant DNA technology, via cell expression or in vitro translation and chemical synthesis techniques known to those of skill in the art (Sambrook et al., Molecular Cloning: A Laboratory Manual, 2^{nd} edition).

### Methods of Gene Delivery.

[0272] Also provided is a method of using vector construct or AAV particle as described herein to deliver a gene encoding the protein of interest. In one embodiment, a gene delivery vector may be a viral gene delivery vector, such as a viral particle, or a non-viral gene delivery vector, such as a vector construct or nucleic acid encoding the protein of interest. Viral vectors include lenti-, adeno-, herpes viral vectors. It is preferably a recombinant adeno-associated viral (rAAV) vector. Alternatively, non-viral systems may be used, including using naked DNA (with or without chromatin attachment regions) or conjugated DNA that is introduced into cells by various transfection methods such as lipids or electroporation.

[0273] Non-limiting examples of a vector construct as described herein include any of SEQ ID Nos: 3-41 or 92-169.

[0274] In some embodiments, the vector construct or AAV vector genome comprises a nucleotide sequence having at least about 80%, 85% 90%, at least about 95%, at least about 96%, at least about 97%, at least about 98%, at least about 99%, or more, sequence identity to any of SEQ ID Nos: 3-41 or 92-169 (over the full length of SEQ ID Nos: 3-41 or 92-169, respectively). In some embodiments, the vector construct comprises a nucleotide sequence having at least about 85% sequence identity to any of SEQ ID Nos: 3-41 or 92-169. Preferably, the vector construct or AAV vector genome of the AAV particle comprises a nucleotide sequence having at least about 95.5%, 96%, 96.5%, 97%, 97.5%, 98%, 98.5%, 99%, 99.5% or more, sequence identity to any of SEQ ID Nos: 3-41 or 92-169. Even more preferably, the nucleotide sequence of the vector construct is at least 97% or 98% or 99% or more identical to any of SEQ ID Nos: 3-41 or 92-169. In other embodiments, the vector construct comprises a nucleotide sequence at least 97%, 98% or 99% identical to a nucleotide sequence that is complementary to or is a negative (−) strand of any of SEQ ID NO: 3-41 or 92-169.

[0275] In some embodiments, the vector construct comprises a nucleotide sequence at least 97%, 98% or 99% identical to any of SEQ ID NO: 3, 6, 9, 12, 15, 18, 21, 24, 27, 30, 33, 36, or 39. In other embodiments, the vector construct comprises a nucleotide sequence at least 97%, 98% or 99% identical to a nucleotide sequence that is complementary to or is a negative (−) strand of any of SEQ ID NO: 3, 6, 9, 12, 15, 18, 21, 24, 27, 30, 33, 36, or 39.

[0276] In some embodiments, the vector construct comprises a nucleotide sequence at least 97%, 98% or 99% identical to any of SEQ ID NO: 4, 7, 10, 13, 16, 19, 22, 25, 28, 31, 34, 37, or 40. In other embodiments, the vector construct comprises a nucleotide sequence at least 97%, 98% or 99% identical to a nucleotide sequence that is complementary to or is a negative (−) strand of any of SEQ ID NO: 4, 7, 10, 13, 16, 19, 22, 25, 28, 31, 34, 37, or 40.

[0277] In some embodiments, the vector construct comprises a nucleotide sequence at least 97%, 98% or 99% identical to any of SEQ ID NO: 5, 8, 11, 14, 17, 20, 23, 26, 29, 32, 35, 38, or 41. In other embodiments, the vector construct comprises a nucleotide sequence at least 97%, 98% or 99% identical to a nucleotide sequence that is complementary to or is a negative (−) strand ofany of 5, 8, 11, 14, 17, 20, 23, 26, 29, 32, 35, 38, or 41.

[0278] The present disclosure finds use in both veterinary and medical applications. Suitable subjects for gene delivery methods as described herein include both avians and mammals, with mammals being preferred and humans being most preferred. Human subjects include neonates, infants, juveniles, and adults.

### Non-Viral Gene Delivery.

[0279] Non-viral gene delivery may be carried out using naked DNA which is the simplest method of non-viral transfection. It may be possible, for example, to administer the vector constructs provided herein using naked plasmid DNA. Alternatively, the vector constructs may be delivered using methods involving electroporation, sonoporation or the use of a “gene gun”, which shoots DNA coated gold particles into the cell using, for example, high pressure gas or an inverted .22 calibre gun (Helios® Gene Gun System (BIO-RAD)), microinjection, lasers, elevated temperature, ultrasound, hydrodynamic gene transfer, magnetotransfection, chemical transfection (e.g., calcium phosphate, DEAE-dextran), liposomes, lipoplexes, dendrimers, lipid nanoparticles or inorganic nanoparticles, all of which are known in the art.

[0280] To improve the delivery of a vector construct into a cell, it may be necessary to protect it from damage and to facilitate its entry into the cell. To this end, lipoplexes and polyplexes may be used that have the ability to protect a nucleic acid from undesirable degradation during the transfection process.

[0281] Vector constructs may be coated with lipids in an organized structure such as a micelle or a liposome. When the organized structure is complexed with DNA it is called a lipoplex. Anionic and neutral lipids may be used for the construction of lipoplexes for synthetic vectors. In one embodiment, cationic lipids, due to their positive charge, may be used to condense negatively charged DNA molecules so as to facilitate the encapsulation of DNA into liposomes. If may be necessary to add helper lipids (usually electroneutral lipids, such as DOPE) to cationic lipids so as to form lipoplexes (Dabkowska et al., J. R. Soc. Interface. 9(68): 548-61 (2012).

[0282] In certain embodiments, complexes of polymers with DNA, called polyplexes, may be used to deliver a vector construct. Most polyplexes consist of cationic polymers and their production is regulated by ionic interactions. Polyplexes typically cannot release their DNA load into the cytoplasm. Thus, co-transfection with endosome-lytic agents (to lyse the endosome that is made during endocytosis, the process by which the polyplex enters the cell), such as inactivated adenovirus, may be necessary (Akinc et al., J. Gene Medic. 7 (5): 657-63).

[0283] In certain embodiments, hybrid methods may be used to deliver a vector construct that combines two or more techniques. Virosomes are one example; they combine liposomes with an inactivated HIV or influenza virus. In another embodiment, other methods involve mixing other viral vectors with cationic lipids or hybridizing viruses and may be used to deliver a nucleic acid (Khan, Firdos Alam, Biotechnology Fundamentals, CRC Press, Nov. 18, 2015, p. 395).

[0284] In certain embodiments, a dendrimer may be used to deliver a vector construct, in particular, a cationic dendrimer, i.e., one with a positive surface charge. When in the presence of genetic material as DNA or RNA, charge complementarity leads to a temporary association of the nucleic acid with the cationic dendrimer. On reaching its destination the dendrimer-nucleic acid complex is then imported into the cell via endocytosis (Amiji, Mansoor M. ed., Polymeric Gene Delivery: Principles and Applications, CRC Press, Sep. 29, 2004, p. 142.)

### Viral Particles.

[0285] In one embodiment, a suitable viral gene delivery vector such as a viral particle may be used to deliver a nucleic acid. In certain embodiments, viral gene delivery vectors suitable for use herein may be a parvovirus, an adenovirus, a retrovirus, a gamma-retrovirus, a lentivirus, a herpes simplex virus, a vaccinia virus, a measles virus, a vesicular stomatitis virus, a polio virus or a reovirus. The parvovirus may be an adenovirus-associated virus (AAV).

[0286] Accordingly, the present disclosure provides viral particles for use as gene delivery vectors (comprising a vector construct provided herein) based on animal parvoviruses, in particular dependoviruses such as infectious human or simian AAV, and the components thereof (e.g., an animal parvovirus genome) for introduction and/or expression of a cMyBP-C protein in a mammalian cell. The term “parvoviral” as used herein thus encompasses dependoviruses such as any type of AAV.

[0287] Viruses of the Parvoviridae family are small DNA animal viruses. The family Parvoviridae may be divided between two subfamilies: the Parvovirinae, which infect vertebrates, and the Densovirinae, which infect insects. Members of the subfamily Parvovirinae are herein referred to as the parvoviruses and include the genus Dependovirus. As may be deduced from the name of their genus, members of the Dependovirus are unique in that they usually require coinfection with a helper virus such as adenovirus or herpes virus for productive infection in cell culture. The genus Dependovirus includes AAV, which normally infects humans (e.g., serotypes 1, 2, 3A, 3B, 4, 5, and 6), primates (e.g., serotypes 1 and 4), and related viruses that infect other warm-blooded animals (e.g., bovine, canine, equine, mice, rats, and ovine adeno-associated viruses) in addition to birds and reptiles. Further information on parvoviruses and other members of the Parvoviridae is described in Kenneth I. Berns, “Parvoviridae: The Viruses and Their Replication,” Chapter 69 in Fields Virology (3d Ed. 1996). For convenience the present disclosure is further exemplified and described herein by reference to AAV. It is, however, understood that the present disclosure is not limited to AAV but may equally be applied to other parvoviruses.

[0288] Production of AAV particles requires AAV “rep” and “cap” genes, which are genes encoding replication and encapsidation proteins, respectively. AAV rep and cap genes have been found in all AAV serotypes examined to date, and are described herein and in the references cited. In wild-type AAV, the rep and cap genes are generally found adjacent to each other in the viral genome (i.e., they are “coupled” together as adjoining or overlapping transcriptional units), and they are generally conserved among AAV serotypes. AAV rep and cap genes are also individually and collectively referred to as “AAV packaging genes.” The AAV cap genes for use herein encode Cap proteins which are capable of packaging AAV vectors in the presence of rep and adeno helper function and are capable of binding target cellular receptors. In some embodiments, the AAV cap gene encodes a capsid protein having an amino acid sequence derived from a particular AAV serotype.

[0289] The AAV sequences employed for the production of AAV can be derived from the genome of any AAV serotype. Generally, the AAV serotypes have genomic sequences of significant homology at the amino acid and the nucleic acid levels, provide a similar set of genetic functions, produce virions which are essentially physically and functionally equivalent, and replicate and assemble by practically identical mechanisms. For the genomic sequence of AAV serotypes and a discussion of the genomic similarities. (See, e.g., GenBank Accession number U89790; GenBank Accession number J01901; GenBank Accession number AF043303; GenBank Accession number AF085716; Chiorini et al., J. Virol. 71: 6823-33 (1997); Srivastava et al., J. Virol. 45: 555-64 (1983); Chiorini et al., J. Virol. 73: 1309-19 (1999); Rutledge et al., J. Virol. 72: 309-19 (1998); and Wu et al., J. Virol. 74: 8635-47(2000)).

[0290] The genomic organization of all known AAV serotypes is very similar. The genome of AAV is a linear, single-stranded DNA molecule that is less than about 5,000 nucleotides (nt) in length. Inverted terminal repeats (ITRs) flank the unique coding nucleotide sequences for the non-structural replication (Rep) proteins and the structural (VP) proteins. The VP proteins form the capsid. The assembly-activating protein (AAP) rapidly chaperones capsid assembly and prevents degradation of free capsid proteins (Grosse et al., J. Virol. 91(20): e01198-17 (2017). The terminal 145 nt are self-complementary and are organized so that an energetically stable intramolecular duplex forming a T-shaped hairpin may be formed. These hairpin structures function as an origin for viral DNA replication, serving as primers for the cellular DNA polymerase complex. The Rep genes encode the Rep proteins, Rep78, Rep68, Rep52, and Rep40. Rep78 and Rep68 are transcribed from the p5 promoter, and Rep 52 and Rep40 are transcribed from the p19 promoter. The cap genes encode the VP proteins, VP1, VP2, and VP3. The cap genes are transcribed from the p40 promoter. The ITRs employed in the vectors of the present embodiment may correspond to the same serotype as the associated cap genes, or may differ. In one embodiment, the ITRs employed herein correspond to an AAV2 serotype and the cap genes correspond to an AAV5 serotype.

[0291] The AAV VP proteins are known to determine the cellular tropicity of the AAV virion. The VP protein-encoding sequences are significantly less conserved than Rep proteins and genes among different AAV serotypes. The ability of Rep and ITR sequences to cross-complement corresponding sequences of other serotypes allows for the production of pseudotyped AAV particles comprising the capsid proteins of a serotype (e.g., AAV1, 5 or 8) and the Rep and/or ITR sequences of another AAV serotype (e.g., AAV2). Such pseudotyped rAAV particles are a part of the present disclosure.

[0292] The AAV particles described herein (and the encoding AAV vector genomes) may comprise any of the capsid proteins described in WO-2018/022608 or WO-2019/222136, incorporated by reference herein in its entirety for its disclosure of human and simian AAV capsids and their properties such as transduction efficiency, tissue tropism, glycan-binding, and resistance to neutralization by IVIG, including but not limited to any of the capsids in the sequence listing and variants thereof, e.g., with chimeric swapped variable regions and/or glycan binding sequences and/or GH loop.

[0293] In one embodiment, the AAV ITR sequences for use in the context of the present disclosure are derived from AAV1, AAV2, AAV4 and/or AAV6. Likewise, the Rep (e.g., Rep78 and Rep52) coding sequences are in one embodiment derived from AAV1, AAV2, AAV4 and/or AAV6. The sequences coding for the VP1, VP2, and VP3 capsid proteins for use in the context of the present disclosure may however be taken from any serotype, such as from AAV1, AAV2, AAV3, AAV4, AAV5, AAV6, AAV7, AAV8, AAV9, AAV10, AAV11 or AAV12, or from simian AAVs, including any of the capsid proteins described in WO 2018/022608 or PCT/US19/32097, or newly developed AAV-like particles obtained by e.g., capsid shuffling techniques and AAV capsid libraries, or any capsid at least 90% identical to any of SEQ ID Nos: 75-91.

[0294] For example, the amino acid sequences of various capsids are published. See, e.g.,
[0295] AAVRh.1/hu.14/AAV9 AAS99264.1 (SEQ ID NO: 75)
[0296] AAVRh.8 SEQ97 of U.S. Pat. Pub. 2013/0045186 (SEQ ID NO: 76)
[0297] AAVRh.10 SEQ81 of U.S. Pat. Pub. 2013/0045186 (SEQ ID NO: 77)
[0298] AAVRh.74 SEQ 1 of Int'l. Pat. Pub. WO 2013/123503 (SEQ ID NO: 78)
[0299] AAV1 AAB_95452.1 (SEQ ID NO: 79)
[0300] AAV2 YP_680426.1 (SEQ ID NO: 80)
[0301] AAV3 NP_043941.1 (SEQ ID NO: 81)
[0302] AAV3B AAB95452.1 (SEQ ID NO: 82)
[0303] AAV4 NP_044927.1 (SEQ ID NO: 83)
[0304] AAV5 YP_068409.1 (SEQ ID NO: 84)
[0305] AAV6 AAB95450.1 (SEQ ID NO: 85)
[0306] AAV7 YP_077178.1 (SEQ ID NO: 86)
[0307] AAV8 YP_077180.1 (SEQ ID NO: 87)
[0308] AAV10 AAT46337.1 (SEQ ID NO: 88)
[0309] AAV11 AAT46339.1 (SEQ ID NO: 89)
[0310] AAV12 AB116639.1 (SEQ ID NO: 90)
[0311] AAV13 ABZ10812.1 (SEQ ID NO: 91)

[0312] Modified “AAV” sequences also can be used in the context of the present disclosure, e.g., for the production of AAV gene therapy vectors. Such modified sequences e.g., sequences having at least about 70%, at least about 75%, at least about 80%, at least about 85%, at least about 90%, at least about 95%, or more nucleotide and/or amino acid sequence identity (e.g., a sequence having about 75-99% nucleotide sequence identity) to an AAV1, AAV2, AAV3, AAV4, AAV5, AAV6, AAV7, AAV8 or AAV9 ITR, Rep, or VP, can be used in place of wild-type AAV ITR, Rep, or VP sequences.

[0313] In some embodiments, a nucleic acid sequence encoding an AAV capsid protein is operably linked to expression control sequences for expression in a specific cell type, such as Sf9 or HEK cells. Techniques known to one skilled in the art for expressing foreign genes in insect host cells or mammalian host cells can be used to practice the embodiment. Methodology for molecular engineering and expression of polypeptides in insect cells is described, for example, in Summers and Smith (1986) A Manual of Methods for Baculovirus Vectors and Insect Culture Procedures, Texas Agricultural Experimental Station Bull. No. 7555, College Station, Tex.; Luckow (1991) In Prokop et al., Cloning and Expression of Heterologous Genes in Insect Cells with Baculovirus Vectors' Recombinant DNA Technology and Applications, 97-152; King, L. A. and R. D. Possee (1992) The baculovirus expression system, Chapman and Hall, United Kingdom; O'Reilly, D. R., L. K. Miller, V. A. Luckow (1992) Baculovirus Expression Vectors: A Laboratory Manual, New York; W.H. Freeman and Richardson, C. D. (1995) Baculovirus Expression Protocols, Methods in Molecular Biology, volume 39; U.S. Pat. No. 4,745,051; US-2003148506; and WO-03/074714, all of which are incorporated by reference in their entireties. A particularly suitable promoter for transcription of a nucleotide sequence encoding an AAV capsid protein is e.g., the polyhedron promoter. However, other promoters that are active in insect cells are known in the art, e.g., the p10, p35 or IE-1 promoters and further promoters described in the above references are also contemplated.

[0314] Use of insect cells for expression of heterologous proteins is well documented, as are methods of introducing nucleic acids, such as vectors, e.g., insect-cell compatible vectors, into such cells and methods of maintaining such cells in culture. (See, e.g., METHODS IN MOLECULAR BIOLOGY, ed. Richard, Humana Press, NJ (1995); O'Reilly et al., BACULOVIRUS EXPRESSION VECTORS, A LABORATORY MANUAL, Oxford Univ. Press (1994); Samulski et al., J. Virol. 63: 3822-8 (1989); Kajigaya et al., Proc. Nat'l. Acad. Sci. USA, 88: 4646-50 (1991); Ruffing et al., J. Virol. 66: 6922-30 (1992); Kirnbauer et al., Virol. 219: 37-44 (1996); Zhao et al., Virol. 272: 382-93 (2000); and U.S. Pat. No. 6,204,059). In some embodiments, the nucleic acid construct encoding AAV proteins (e.g., AAV rep or cap proteins) in insect cells is an insect cell-compatible vector. An “insect cell-compatible vector” or “vector” as used herein refers to a nucleic acid molecule capable of productive transformation or transfection of an insect or insect cell. Exemplary biological vectors include plasmids, linear nucleic acid molecules, and recombinant viruses. Any vector can be employed as long as it is insect cell-compatible. The vector may integrate into the insect cells genome but the presence of the vector in the insect cell need not be permanent and transient episomal vectors are also included. The vectors can be introduced by any means known, for example by chemical treatment of the cells, electroporation, or infection. In some embodiments, the vector is a baculovirus, a viral vector, or a plasmid. In one embodiment, the vector is a baculovirus, i.e., the construct is a baculoviral vector. Baculoviral vectors and methods for their use are described in the above cited references on molecular engineering of insect cells.

### Methods of Producing Recombinant AAV Particles

[0315] The present disclosure provides materials and methods for producing recombinant AAV particles in insect or mammalian cells that comprise any of the vector constructs described herein. In some embodiments, the vector construct further comprises a promoter and a restriction site downstream of the promoter to allow insertion of a polynucleotide encoding one or more proteins of interest, wherein the promoter and the restriction site are located downstream of the 5′ AAV ITR and upstream of the 3′ AAV ITR. In some embodiments, the vector construct further comprises a posttranscriptional regulatory element downstream of the restriction site and upstream of the 3′ AAV ITR. In some embodiments, the vector construct further comprises a polynucleotide inserted at the restriction site and operably linked with the promoter, where the polynucleotide comprises the coding region of a protein of interest. As a skilled artisan will appreciate, any one of the AAV vector constructs disclosed in the present application can be used in methods to produce the recombinant AAV particle.

[0316] In some embodiments, the helper functions for producing AAV are provided by one or more helper plasmids or helper viruses comprising adenoviral or baculoviral helper genes. Non-limiting examples of the adenoviral or baculoviral helper genes include, but are not limited to, E1A, E1B, E2A, E4 and VA, which can provide helper functions to AAV packaging.

[0317] Helper viruses of AAV are known in the art and include, for example, viruses from the family Adenoviridae and the family Herpes viridae. Examples of helper viruses of AAV include, but are not limited to, SadV-13 helper virus and SadV-13-like helper virus described in US Publication No. 20110201088 (the disclosure of which is incorporated herein by reference), and helper vectors pHELP (Applied Viromics). A skilled artisan will appreciate that any helper virus or helper plasmid of AAV that can provide adequate helper function to AAV can be used herein.

[0318] In some embodiments, the AAV cap genes are present in a plasmid. The plasmid can further comprise an AAV rep gene which may or may not correspond to the same serotype as the cap genes. The cap genes and/or rep gene from any AAV serotype described herein (including, but not limited to, AAV1, AAV2, AAV4, AAV5, AAV6, AAV7, AAV8, AAV9, AAV10, AAV 11, AAV12, AAV13 and any variants thereof) can be used to produce the recombinant AAV. In some embodiments, the AAV cap genes encode a capsid from serotype 1, serotype 2, serotype 4, serotype 5, serotype 6, serotype 7, serotype 8, serotype 9, serotype 10, serotype 11, serotype 12, serotype 13 or a variant thereof.

[0319] In some embodiments, the insect or mammalian cell can be transfected with the helper plasmid or helper virus, the vector construct and the plasmid encoding the AAV cap genes; and the recombinant AAV virus can be collected at various time points after co-transfection. For example, the recombinant AAV virus can be collected at about 12 hours, about 24 hours, about 36 hours, about 48 hours, about 72 hours, about 96 hours, about 120 hours, or a time between any of these two time points after the co-transfection.

[0320] Recombinant AAV particles can also be produced using any conventional methods known in the art suitable for producing infectious recombinant AAV. In some instances, a recombinant AAV can be produced by using an insect or mammalian cell that stably expresses some of the necessary components for AAV particle production. For example, a plasmid (or multiple plasmids) comprising AAV rep and cap genes, and a selectable marker, such as a neomycin resistance gene, can be integrated into the genome of the cell. The insect or mammalian cell can then be co-infected with a helper virus (e.g., adenovirus or baculovirus providing the helper functions) and the viral vector construct comprising the 5′ and 3′ AAV ITR (and the nucleotide sequence encoding the heterologous protein, if desired). The advantages of this method are that the cells are selectable and are suitable for large-scale production of the recombinant AAV particle. As another non-limiting example, adenovirus or baculovirus rather than plasmids can be used to introduce rep and cap genes into packaging cells. As yet another non-limiting example, both the viral vector construct containing the 5′ and 3′ AAV ITRs and the rep-cap genes can be stably integrated into the DNA of producer cells, and the helper function can be provided by a wild-type adenovirus to produce the recombinant AAV.

[0321] In one aspect, provided herein are methods for the production of an AAV particle, useful as a gene delivery vector, the method comprising the steps of:
[0322] (a) providing a cell permissive for AAV replication (e.g., an insect cell or a mammalian cell) with one or more nucleic acid constructs comprising:
   [0323] (i) a nucleic acid molecule (e.g., recombinant vector construct) provided herein that is flanked by at least one AAV Inverted terminal repeat nucleotide sequence;
   [0324] (ii) a nucleotide sequence encoding one or more AAV Rep proteins which is operably linked to a promoter that is capable of driving expression of the Rep protein(s) in the cell;
   [0325] (iii) a nucleotide sequence encoding one or more AAV capsid proteins which is operably linked to a promoter that is capable of driving expression of the capsid protein(s) in the cell;
   [0326] (iv) and optionally AAP and MAAP contained in the VP2/3 mRNA
[0327] (b) culturing the cell defined in (a) under conditions conducive to the expression of the Rep and the capsid proteins; and,
[0328] optionally, (c) recovering the AAV gene delivery vector, and
[0329] optionally (d) purifying the AAV particle. For example, the recombinant vector construct of (i) comprises (1) at least one AAV ITR, (2) a heterologous cardiomyocyte-specific transcription regulatory region as described herein, and (3) a nucleic acid encoding a functional cMyBP-C. Preferably the recombinant vector construct of (i) comprises both a 5′ and 3′ AAV ITR.

[0330] Typically then, a method provided herein for producing a AAV gene delivery vector comprises: providing to a cell permissive for AAV replication (a) a nucleotide sequence encoding a template for producing vector genome, e.g., vector construct of the present disclosure (as described in detail herein); (b) nucleotide sequences sufficient for replication of the template to produce a vector genome (the first expression cassette defined above); (c) nucleotide sequences sufficient to package the vector genome into an AAV capsid (the second expression cassette defined above), under conditions sufficient for replication and packaging of the vector genome into the AAV capsid, whereby AAV particles comprising the vector genome encapsulated within the AAV capsid are produced in the cell.

[0331] Transient transfection of adherent HEK293 cells (Chahal et al., J. Virol. Meth. 196: 163-73 (2014)) and transfection of Sf9 cells, using the baculovirus expression vector system (BEVS) (Mietzsch et al., Hum. Gene Ther. 25: 212-22 (2014)), are two of the most commonly used methods to produce AAV vectors.

[0332] The viral particles comprising the vector constructs described herein may be produced using any cell type such as mammalian and invertebrate cell types which allows for production of AAV or biologic products and which can be maintained in culture.

[0333] There are a number of methods for generating AAV viral particles: for example, but not limited to, transfection using vector and AAV helper sequences in conjunction with coinfection with one of the AAV helper viruses (e.g., adenovirus, herpesvirus, or vaccinia virus) or transfection with a recombinant AAV vector, an AAV helper vector, and an accessory function vector. Methods of making AAV viral particles are described in e.g., U.S. Pat. Nos. U.S. Pat. Nos. 6,204,059, 5,756,283, 6,258,595, 6,261,551, 6,270,996, 6,281,010, 6,365,394, 6,475,769, 6,482,634, 6,485,966, 6,943,019, 6,953,690, 7,022,519, 7,238,526, 7,291,498 and 7,491,508, 5,064,764, 6,194,191, 6,566,118, 8,137,948; or International Publication Nos. WO1996039530, WO1998010088, WO1999014354, WO1999015685, WO1999047691, WO2000055342, WO2000075353, WO2001023597, WO2015191508, WO2019217513, WO2018022608, WO2019222136, WO2020232044, WO2019222132; Methods In Molecular Biology, ed. Richard, Humana Press, NJ (1995); O'Reilly et al., Baculovirus Expression Vectors, A Laboratory Manual, Oxford Univ. Press (1994); Samulski et al., J. Vir. 63:3822-8 (1989); Kajigaya et al., Proc. Nat'l. Acad. Sci. USA 88: 4646-50 (1991); Ruffing et al., J. Vir. 66:6922-30 (1992); Kimbauer et al., Vir., 219:37-44 (1996); Zhao et al., Vir. 272:382-93 (2000); the contents of each of which are herein incorporated by reference in their entirety. For detailed descriptions of methods for generating AAV viral particles see, for example, U.S. Pat. Nos. 6,001,650, 6,004,797, and 9,504,762, each herein incorporated by reference in its entirety. In one embodiment, a triple transfection method (see, e.g., U.S. Pat. No. 6,001,650, herein incorporated by reference in its entirety) is used to produce AAV viral particles. This method does not require the use of an infectious helper virus, enabling AAV viral particles to be produced without any detectable helper virus present. This is accomplished by use of three vectors for AAV viral particle production, namely an AAV helper function vector, an accessory function vector, and an AAV viral particle expression vector. One of skill in the art will appreciate, however, that the nucleic acid sequences encoded by these vectors can be provided on two or more vectors in various combinations. In other embodiments, the host cell can be transfected with the helper plasmid or helper virus, the viral construct and the plasmid encoding the AAV cap genes; and the AAV viral particles can be collected at various time points after co-transfection.

[0334] For example, wild-type AAV and helper viruses may be used to provide the necessary replicative functions for producing AAV viral particles (see, e.g., U.S. Pat. No. 5,139,941, herein incorporated by reference in its entirety). Alternatively, a plasmid, containing helper function genes, in combination with infection by one of the well-known helper viruses can be used as the source of replicative functions (see e.g., U.S. Pat. Nos. 5,622,856 and 5,139,941, both herein incorporated by reference in their entireties). Similarly, a plasmid, containing accessory function genes can be used in combination with infection by wild-type AAV, to provide the necessary replicative functions. Other approaches, described herein and/or well known in the art, can also be employed by the skilled artisan to produce AAV viral particles.

[0335] The term “vector” is understood to refer to any genetic element, such as a plasmid, phage, transposon, cosmid, bacmid, mini-plasmid (e.g., plasmid devoid of bacterial elements), Doggybone DNA (e.g., minimal, closed-linear constructs), chromosome, virus, virion (e.g., baculovirus), etc., which is capable of replication when associated with the proper control elements and which can transfer gene sequences between cells. A “mammalian cell-compatible vector” or “vector” as used herein refers to a nucleic acid molecule capable of productive transformation or transfection of a mammal or mammalian cell. An “insect cell-compatible vector” or “vector” as used herein refers to a nucleic acid molecule capable of productive transformation or transfection of an insect or insect cell. Exemplary biological vectors include plasmids, linear nucleic acid molecules, and recombinant viruses. Any vector can be employed as long as it is insect cell-compatible. The vector may integrate into the insect cells genome but the presence of the vector in the insect cell need not be permanent and transient episomal vectors are also included. The vectors can be introduced by any means known, for example by chemical treatment of the cells, electroporation, or infection. Vectors and methods for their use are described in the above cited references on molecular engineering of cells.

[0336] The vector from which the cell generates an rAAV vector genome may contain a promoter and a restriction site downstream of the promoter to allow insertion of a polynucleotide encoding one or more proteins of interest, wherein the promoter and the restriction site are located downstream of the 5′ AAV ITR and upstream of the 3′ AAV ITR. The vector may also contain a posttranscriptional regulatory element downstream of the restriction site and upstream of the 3′ AAV ITR. The viral construct may further comprise a polynucleotide inserted at the restriction site and operably linked with the promoter, where the polynucleotide comprises the coding region of a protein of interest. In some embodiments, the viral construct further includes a promoter and a restriction site downstream of the promoter to allow insertion of a polynucleotide encoding one or more proteins of interest, wherein the promoter and the restriction site are located downstream of the 5′ AAV ITR and upstream of the 3′ AAV ITR. In some embodiments, the viral construct further incudes a posttranscriptional regulatory element downstream of the restriction site and upstream of the 3′ AAV ITR. In some embodiments, the viral construct further includes a polynucleotide inserted at the restriction site and operably linked with the promoter, where the polynucleotide includes the coding region of a protein of interest. As a skilled artisan will appreciate, any one of the AAV vectors disclosed in the present application can be used in the method as the viral construct to produce the rAAV virions.

[0337] The term “AAV helper” refer to AAV-derived coding sequences which can be expressed to provide AAV gene products that, in turn, function in trans for productive AAV replication. Thus, AAV helper functions include both of the major AAV open reading frames (ORFs), rep and cap. The Rep expression products have been shown to possess many functions, including, among others: recognition, binding and nicking of the AAV origin of DNA replication; DNA helicase activity; and modulation of transcription from AAV (or other heterologous) promoters. The capsid (Cap) expression products supply necessary packaging functions. AAV helper functions are used herein to complement AAV functions in trans that are missing from AAV vector genomes.

[0338] For production, cells with AAV helper functions produce recombinant capsid proteins sufficient to form a capsid. This includes at least VP1 and VP3 proteins, but more typically, all three of VP1, VP2, and VP3 proteins, as found in native AAV. The sequence of the capsid proteins determines the serotype of the AAV virions produced by the host cell. Capsids useful in the invention include those derived from a number of AAV serotypes, including 1, 2, 3, 3B, 4, 5, 6, 7, 8, 9, 10, 11, 12, 13 or mixed serotypes (see, e.g., U.S. Pat. No. 8,318,480 for its disclosure of non-natural mixed serotypes). The capsid proteins can also be variants of natural VP1, VP2 and VP3, including mutated, chimeric or shuffled proteins. The capsid proteins can be those of rh.10 or other subtype within the various clades of AAV; various clades and subtypes are disclosed, for example, in U.S. Pat. No. 7,906,111. Because of wide construct availability and extensive characterization, illustrative AAV vectors disclosed below are derived from serotype 2. Construction and use of AAV vectors and AAV proteins of different serotypes are discussed in Chao et al., Mol. Ther. 2:619-623, 2000; Davidson et al., PNAS 97:3428-3432, 2000; Xiao et al., J. Virol. 72:2224-2232, 1998; Halbert et al., J. Virol. 74:1524-1532, 2000; Halbert et al., J. Virol. 75:6615-6624, 2001; and Auricchio et al., Hum. Molec. Genet. 10:3075-3081, 2001.

[0339] In various embodiments, nucleotide sequences encoding VP proteins can be operably linked to a suitable expression control sequence. In various embodiments, nucleotide sequences encoding Rep proteins can be operably linked to a suitable expression control sequence such as eukaryotic promoters. For example, the nucleotide sequences can be operably linked to eukaryotic promoters such as the SV40 promoter, CMV promoter, RSV promoter, UBC promoter, EF1A promoter, PGK promoter, dihydrofolate reductase promoter, the b-actin promoter, TRE (Tet, Tet-On, Tet-Off) promoter, Cumate controlled systems (CuR/CuO) (See US2004/0205834), the temperature-induced HSP70 promoter, p5 promoter, p10 promoter, p19 promoter, and the p40 promoter. In another example, the nucleotide sequences can be operably linked to baculoviral promoters such as the polyhedrin (Polh) promoter, ΔIE1 promoter, p5 promoter, p10 promoter, p19 promoter, the p40 promoter, metallothionein promoter, 39K promoter, p6.9 promoter, and orf46 promoter.

[0340] For production, cells with AAV helper functions produce Rep proteins to promote production of rAAV. It has been found that infectious particles can be produced when at least one large Rep protein (Rep78 or Rep68) and at least one small Rep protein (Rep52 and Rep40) are expressed in cells. In a specific embodiment all four of Rep 78, Rep68, Rep52 and Rep 40 are expressed. Alternately, Rep78 and Rep52, Rep78 and Rep40, Rep 68 and Rep52, or Rep68 and Rep40 are expressed. Examples below demonstrate the use of the Rep78/Rep52 combination. Rep proteins can be derived from AAV-2 or other serotypes. In various embodiments, nucleotide sequences encoding Rep proteins can be operably linked to a suitable expression control sequence. In various embodiments, nucleotide sequences encoding Rep proteins can be operably linked to a suitable expression control sequence such as eukaryotic promoters. For example, the nucleotide sequences can be operably linked to eukaryotic promoters such as the SV40 promoter, CMV promoter, RSV promoter, UBC promoter, EF1A promoter, PGK promoter, dihydrofolate reductase promoter, the b-actin promoter, TRE (Tet, Tet-On, Tet-Off) promoter, Cumate controlled systems (CuR/CuO) (See US2004/0205834), and the temperature-induced HSP70 promoter, p5 promoter, p10 promoter, p19 promoter, and the p40 promoter. In other examples, the nucleotide sequences can be operably linked to baculoviral promoters such as the polyhedrin (Polh) promoter, ΔIE1 promoter, p5 promoter, p10 promoter, p19 promoter, the p40 promoter, metallothionein promoter, 39K promoter, p6.9 promoter, and orf46 promoter.

[0341] In some embodiments, the AAV cap genes are present in a plasmid or bacmid. The plasmid can further include an AAV rep gene which may or may not correspond to the same serotype as the cap genes. The cap genes and/or rep gene from any AAV serotype.

[0342] Cells with AAV helper functions can also produce assembly-activating proteins (AAP), which help assemble capsids. In various embodiments, nucleotide sequences encoding AAP can be operably linked to a suitable expression control sequence. For example, the nucleotide sequences can be operably linked to eukaryotic promoters. In other examples, the nucleotide sequences can be operably linked to baculoviral promoters such as the polyhedrin (Polh) promoter, ΔIE1 promoter, p5 promoter, p10 promoter p19 promoter, the p40 promoter, metallothionein promoter, 39K promoter, p6.9 promoter, and orf46 promoter.

[0343] The term “non-AAV helper function” refers to non-AAV derived viral and/or cellular functions upon which AAV is dependent for its replication. Thus, the term captures proteins and RNAs that are required in AAV replication, including those moieties involved in activation of AAV gene transcription, stage specific AAV mRNA splicing, AAV DNA replication, synthesis of Cap expression products and AAV capsid assembly. Viral-based accessory functions can be derived from any of the known helper viruses such as adenovirus, herpesvirus (other than herpes simplex virus type-1) and vaccinia virus.

[0344] The term “non-AAV helper function vector” refers generally to a nucleic acid molecule that includes nucleotide sequences providing accessory functions. An accessory function vector can be transfected into a suitable host cell, wherein the vector is then capable of supporting AAV virion production in the host cell. Expressly excluded from the term are infectious viral particles as they exist in nature, such as adenovirus, herpesvirus or vaccinia virus particles. Thus, accessory function vectors can be in the form of a plasmid, phage, transposon or cosmid. In particular, it has been demonstrated that the full-complement of adenovirus genes are not required for accessory helper functions. For example, adenovirus mutants incapable of DNA replication and late gene synthesis have been shown to be permissive for AAV replication. Ito et al., (1970) J. Gen. Virol. 9:243; Ishibashi et al, (1971) Virology 45:317. Similarly, mutants within the E2B and E3 regions have been shown to support AAV replication, indicating that the E2B and E3 regions are probably not involved in providing accessory functions. Carter et al., (1983) Virology 126:505. However, adenoviruses defective in the E1 region, or having a deleted E4 region, are unable to support AAV replication. Thus, EIA and E4 regions are likely required for AAV replication, either directly or indirectly. Laughlin et al., (1982). J. Virol. 41:868; Janik et al., (1981) Proc. Natl. Acad. Sci. USA 78:1925; Carter et al., (1983) Virology 126:505. Other characterized Ad mutants include: E1B (Laughlin et al. (1982), supra; Janik et al. (1981), supra, Ostrove et al., (1980) Virology 104:502); E2A (Handa et al., (1975) J. Gen. Virol. 29:239; Strauss et al., (1976) J. Virol. 17:140; Myers et al., (1980) J. Virol. 35:665; Jay et al., (1981) Proc. Natl. Acad. Sci. USA 78:2927; Myers et al., (1981) J. Biol. Chem. 256:567); E2B (Carter, Adeno-Associated Virus Helper Functions, in I CRC Handbook of Parvoviruses (P. Tijssen ed., 1990)); E3 (Carter et al. (1983), supra); and E4 (Carter et al. (1983), supra; Carter (1995)). Although studies of the accessory functions provided by adenoviruses having mutations in the E1B coding region have produced conflicting results, Samulski et al., (1988) J. Virol. 62:206-210, recently reported that E1B55k is required for AAV virion production, while E1B19k is not. In addition, International Publication WO 97/17458 and Matshushita et al., (1998) Gene Therapy 5:938-945, describe accessory function vectors encoding various Ad genes. Particularly preferred accessory function vectors comprise an adenovirus VA RNA coding region, an adenovirus E4 ORF6 coding region, an adenovirus E2A 72 kD coding region, an adenovirus E1A coding region, and an adenovirus E1B region lacking an intact E1B55k coding region. Such vectors are described in International Publication No. WO 01/83797.

[0345] In another embodiment, the methods provided herein are carried out with any mammalian cell type which allows for replication of AAV or production of biologic products, and which can be maintained in culture. In one embodiment, mammalian cells used can be HEK293, HeLa, CHO, NSO, SP2/0, PER.C6, Vero, RD, BHK, HT 1080, A549, Cos-7, ARPE-19, and MRC-5 cells.

[0346] Use of insect cells for expression of heterologous proteins is well documented, as are methods of introducing nucleic acids, such as vectors, e.g., insect-cell compatible vectors, into such cells and methods of maintaining such cells in culture. (See, e.g., METHODS IN MOLECULAR BIOLOGY, ed. Richard, Humana Press, NJ (1995); O'Reilly et al., BACULOVIRUS EXPRESSION VECTORS, A LABORATORY MANUAL, Oxford Univ. Press (1994); Samulski et al., J. Vir. (1989) vol. 63, pp. 3822-3828; Kajigaya et al., Proc. Nat'l. Acad. Sci. USA (1991) vol. 88, pp. 4646-4650; Ruffing et al., J. Vir. (1992) vol. 66, pp. 6922-6930; Kirnbauer et al., Vir. (1996) vol. 219, pp. 37-44; Zhao et al., Vir. (2000) vol. 272, pp. 382-393; and U.S. Pat. No. 6,204,059). In some embodiments, the nucleic acid construct encoding AAV in insect cells is an insect cell-compatible vector. “Expression vector” refers to a vector including a recombinant polynucleotide including expression control sequences operatively linked to a nucleotide sequence to be expressed. An expression vector includes sufficient cis-acting elements for expression; other elements for expression can be supplied by the host cell or in vitro expression system. Expression vectors include all those known in the art, such as cosmids, plasmids (e.g., naked or contained in liposomes), artificial chromosomes, and viruses that incorporate the recombinant polynucleotide. An “insect cell-compatible vector” or “vector” as used herein refers to a nucleic acid molecule capable of productive transformation or transfection of an insect or insect cell. Exemplary biological vectors include plasmids, linear nucleic acid molecules, and recombinant viruses. Any vector can be employed as long as it is insect cell-compatible. The vector may integrate into the insect cells genome but the presence of the vector in the insect cell need not be permanent and transient episomal vectors are also included. The vectors can be introduced by any means known, for example by chemical treatment of the cells, electroporation, or infection. In some embodiments, the vector is a baculovirus, a viral vector, or a plasmid. In a more preferred embodiment, the vector is a baculovirus, i.e., the construct is a baculoviral vector. Baculoviral vectors and methods for their use are described in the above cited references on molecular engineering of insect cells.

[0347] For example, the insect cell line used can be from Spodoptera frugiperda, such as SF9, SF21, SF900+, drosophila cell lines, mosquito cell lines, e.g., Aedes albopictus derived cell lines, domestic silkworm cell lines, e.g., Bombyx mori cell lines, Trichoplusia ni cell lines such as High Five cells or Lepidoptera cell lines such as Ascalapha odorata cell lines. In one embodiment, insect cells are cells from the insect species which are susceptible to baculovirus infection, including High Five, Sf9, Se301, SeIZD2109, SeUCR1, Sf9, Sf900+, Sf21, BTI-TN-5B1-4, MG-1, Tn368, HzAm1, BM-N, Ha2302, Hz2E5 and Ao38.

[0348] Baculoviruses are enveloped DNA viruses of arthropods, two members of which are well known expression vectors for producing recombinant proteins in cell cultures. Baculoviruses have circular double-stranded genomes (80-200 kbp) which can be engineered to allow the delivery of large genomic content to specific cells. The viruses used as a vector are generally Autographa californica multicapsid nucleopolyhedrovirus (AcMNPV) or Bombyx mori nucleopolyhedrovirus (BmNPV) (Kato et al., Appl. Microbiol. Biotechnol. 85(3): 459-70 (2010).

[0349] Baculoviruses are commonly used for the infection of insect cells for the expression of recombinant proteins. In particular, expression of heterologous genes in insects can be accomplished as described in for instance U.S. Pat. No. 4,745,051; EP 127,839; EP 155,476; Vlak et al., J. Gen. Virol. 68: 765-76 (1988); Miller et al., Ann. Rev. Microbiol. 42: 177-9 (1988); Carbonell et al., Gene, 73(2): 409-18 (1998); Maeda et al., Nature, 315: 592-4 (1985); Lebacq-Veheyden et al., Molec. Cell. Biol. 8(8): 3129-35 (1988); Smith et al., PNAS, 82: 8404-8 (1985); and Miyajima et al., Gene, 58: 273-81 (1987). Numerous baculovirus strains and variants and corresponding permissive insect host cells that can be used for protein production are described in Luckow et al., Nat. Biotechnol. 6: 47-55 (1988); Maeda et al., Nature, 315: 592-4 (1985); and McKenna et al., J. Invert. Pathol. 71(1): 82-90 (1998).

[0350] The baculovirus shuttle vector or bacmids are used for generating baculoviruses. Bacmids propagate in bacteria such as Escherichia coli as a large plasmid. When transfected into insect cells, the bacmids generate baculovirus. In another embodiment, the methods provided herein are carried out with any mammalian cell type which allows for replication of AAV or production of biologic products, and which can be maintained in culture. In one embodiment, mammalian cells used can be HEK293, HeLa, CHO, NSO, SP2/0, PER.C6, Vero, RD, BHK, HT 1080, A549, Cos-7, ARPE-19, and MRC-5 cells.

[0351] rAAV particles can also be produced using methods disclosed in various embodiments. In some instances, rAAV particles can be produced by using an insect or mammalian cell that stably expresses some of the necessary components for rAAV particle production. For example, a plasmid (or multiple plasmids) including AAV rep and cap genes, and a selectable marker, such as a neomycin resistance gene, can be integrated into the genome of the cell. In another example, a plasmid (or multiple plasmids) including a selectable marker, such as a neomycin resistance gene, can be integrated into the genome of the cell. The insect, fungal, or mammalian cell can then be co-infected with a helper virus (e.g., adenovirus or baculovirus providing the helper functions) and the viral vector including the 5′ and 3′ AAV ITR (and the nucleotide sequence encoding the heterologous protein, if desired). The advantages of this method are that the cells are selectable and are suitable for large-scale production of the rAAV. As another non-limiting example, adenovirus or baculovirus rather than plasmids can be used to introduce a host regulatory gene, rep gene, and cap gene into packaging cells.

[0352] In one embodiment, following an expansion of transfected cells in suspension cell culture through a series of increasingly large culture platforms, a suspension of transfected cells is purified through a multi-step process to remove process impurities, including recombinant baculoviruses and host cells, and enrich for the virions comprising the recombinant parvoviral (rAAV) vector construct. In another embodiment, method provided herein may comprise the step of affinity-purification of the rAAV vector construct using an anti-AAV antibody, in one embodiment an immobilized antibody. In another embodiment, the anti-AAV antibody is a monoclonal antibody. One antibody for use herein is a single chain camelid antibody or a fragment thereof as e.g., obtainable from camels or llamas (see e.g., Muyldermans, Biotechnol. 74: 277-302 (2001). The antibody for affinity-purification of rAAV is an antibody that specifically binds an epitope on an AAV capsid protein, whereby in one embodiment the epitope is an epitope that is present on capsid protein of more than one AAV serotype. For example, the antibody may be raised or selected on the basis of specific binding to AAV5 capsid but at the same time also it may also specifically bind to AAV1, AAV2, AAV3, AAV6, AAV8 or AAV9 capsids.

[0353] The methods provided herein for producing rAAV particles produce a population of rAAV particles. In some embodiments, the population is enriched for particles comprising full length or nearly full-length vector genomes by steps that reduce the number of empty capsids.

[0354] The population of rAAV particles produced by the methods provided herein are used, for example, for administration in any of the treatment methods described herein.

Host Organism and/or Cells

[0355] In a further embodiment, a host cell is provided comprising the vector described above. In one embodiment, the vector construct is capable of being replicated, or capable of expressing the nucleic acid molecule provided herein in the host cell. In some embodiments, provided herein are HCM therapeutics that are host cells comprising a vector construct comprising a nucleic acid encoding cMyBP-C, for use in HCM cell therapy. The cells may be autologous or allogeneic to the subject.

[0356] As used herein, the term “host” refers to organisms and/or cells which harbor a nucleic acid molecule or a vector construct of the present disclosure, as well as organisms and/or cells that are suitable for use in expressing a recombinant gene or protein. It is not intended that the present disclosure be limited to any particular type of cell or organism. Indeed, it is contemplated that any suitable organism and/or cell will find use herein as a host. A host cell may be in the form of a single cell, a population of similar or different cells, for example in the form of a culture (such as a liquid culture or a culture on a solid substrate), an organism or part thereof. In one embodiment, a host cell may permit the expression of a nucleic acid molecule provided herein. Thus, the host cell may be, for example, a bacterial, a yeast, an insect or a mammalian cell, or a human cell.

[0357] In another embodiment, provided is a means for delivering a nucleic acid provided herein into a broad range of cells, including dividing and non-dividing cells. The present disclosure may be employed to deliver a nucleic acid provided herein to a cell in vitro, e.g. to produce a polypeptide encoded by such a nucleic acid molecule in vitro or for ex vivo gene therapy.

[0358] The nucleic acid molecule, vector construct, cells and methods/use of the present disclosure are additionally useful in a method of delivering a nucleic acid provided here into a host, typically a host suffering from HCM.

### Pharmaceutical Formulations

[0359] In one embodiment, provided is a pharmaceutical composition comprising a nucleic acid or a vector provided herein and a pharmaceutically acceptable diluent, excipient, or carrier. The pharmaceutical composition may further comprise a second therapeutic agent, or adjuvant, etc. Preferably the composition is sterile if meant for parenteral administration. Preferably the composition is free of infectious viruses and toxins. Preferably the composition is stable for a suitable period of time under storage conditions.

[0360] By “pharmaceutically acceptable” it is meant a material that is not biologically or otherwise undesirable, i.e., the material may be administered to a subject without causing any undesirable biological effects. Thus, such a pharmaceutical composition may be used, for example, in transfection of a cell ex vivo or in administering a viral particle or cell directly to a subject.

[0361] A carrier may be suitable for parenteral administration, which includes intravenous, intraperitoneal or intramuscular administration. Alternatively, the carrier may be suitable for sublingual or oral administration. Pharmaceutically acceptable carriers include sterile aqueous solutions or dispersions and sterile powders for the extemporaneous preparation of sterile injectable solutions or dispersion. The use of such media and agents for pharmaceutically active substances is well known in the art. Except insofar as any conventional media or agent is incompatible with the active compound, use thereof in the pharmaceutical compositions provided herein is contemplated.

[0362] In other embodiments, provided herein are pharmaceutical compositions (i.e., formulations) of AAV particles useful for administration to subjects suffering from a genetic disorder to deliver gene encoding a protein of interest. In certain embodiments, the pharmaceutical formulations provided herein are liquid formulations that comprise recombinant AAV particles comprising any of the vector constructs disclosed herein. The concentration of recombinant AAV virions in the formulation may vary.

[0363] In other embodiments, the AAV particle pharmaceutical formulation provided herein comprises one or more sterile pharmaceutically acceptable excipients to provide the formulation with advantageous properties for storage and/or administration to subjects for the treatment of the genetic disorder.

[0364] In certain aspects, the formulation comprising recombinant AAV particle further comprises one or more buffering agents.

[0365] In another embodiment, the recombinant AAV particle formulation provided herein may comprise one or more isotonicity agents, such as sodium chloride. Other buffering agents and isotonicity agents known in the art are suitable and may be routinely employed for use in the formulations provided herein.

[0366] In another embodiment, the recombinant AAV particle formulations provided herein may comprise one or more bulking agents. Exemplary bulking agents include without limitation mannitol, sucrose, dextran, lactose, trehalose, and povidone (PVP K24).

[0367] In yet another embodiment, the recombinant AAV particle formulations provided herein may comprise one or more surfactants, which may be non-ionic surfactants. Exemplary surfactants include ionic surfactants, non-ionic surfactants, and combinations thereof. For example, the surfactant can be, without limitation, TWEEN 80 (also known as polysorbate 80, or its chemical name polyoxyethylene sorbitan monooleate), sodium dodecylsulfate, sodium stearate, ammonium lauryl sulfate, TRITON AG 98 (Rhone-Poulenc), poloxamer 407, poloxamer 188 and the like, and combinations thereof.

[0368] The recombinant AAV particle formulations provided herein are typically sterile and stable and can be stored for extended periods of time without an unacceptable change in quality, potency, or purity.

[0369] In some embodiments, isotonic agents, for example, sugars, polyalcohols such as mannitol, sorbitol, or sodium chloride are included in the composition. Prolonged absorption of the injectable compositions can be brought about by including in the composition an agent which delays absorption, for example, monostearate salts and gelatin. In certain embodiments, a nucleic acid or vector construct provided herein may be administered in a time or controlled release formulation, for example in a composition which includes a slow release polymer or other carriers that will protect the compound against rapid release, including implants and microencapsulated delivery systems. Biodegradable, biocompatible polymers may for example be used, such as ethylene vinyl acetate, polyanhydrides, polyglycolic acid, collagen, polyorthoesters, polylactic acid and polylactic, polyglycolic copolymers (PLG).

[0370] In certain embodiments, the pharmaceutical composition comprising the vector construct or AAV particle provided herein may be of use in transferring genetic material to a cell. Such transfer may take place in vitro, ex vivo or in vivo. Accordingly, one embodiment provides a method for delivering a nucleotide sequence to a cell, which method comprises contacting a nucleic acid, a vector construct, or a pharmaceutical composition as described herein under conditions such the nucleic acid or vector provided herein enters the cell. The cell may be a cell in vitro, ex vivo or in vivo.

### Methods of Treatment

[0371] The vector constructs or AAV particles described herein are administered to subjects in a dose effective to deliver a MYBPC3 gene to the heart of a mammalian subject. The subject is preferably a human, including a juvenile subject. Juvenile subjects may range in age from 0-2, 2-6, 2-10, 2-12, 2-15, 2-18, 12-18, or 0-18 years of age, for example.

[0372] Such methods include methods of expressing cMyBP-C in heart of a mammalian subject comprising administering to the subject an effective amount of a composition comprising the vector construct described herein, the rAAV particle described herein, or the pharmaceutical composition described herein, thereby expressing cMyBP-C in the heart tissue (e.g., myocardium, or myocardiocytes) of the subject.

[0373] Such methods also include a method of treating a deficiency in functional wild type myosin binding protein C in a mammalian subject by administering an amount of the vector construct, rAAV particle or pharmaceutical composition effective to increase the level of functional myosin binding protein C in the heart tissue (e.g., myocardiocytes). In one or more embodiments, such methods increase levels of cMyBP-C expression in the heart, by at least 50%, at least 60%, at least 70%, at least 80%, at least 90%, at least 95%, or at least 98% compared to the levels without treatment, or to the levels seen in healthy humans. In some embodiments, the amount of the vector construct, rAAV particle or pharmaceutical composit84hosphatifective to increase the level of myosin binding protein C in heart tissue (e.g., myocardiocytes) by at least about 2-fold, and/or to restore contractile force, relative tension, calcium-activated tension, relaxation time, in engineered heart tissue in vitro or in animal tissue in vivo.

[0374] Such methods also include a method of treating HCM in a mammal, or treating or preventing any symptom thereof, comprising administering a therapeutically effective amount of the vector construct, rAAV particle or pharmaceutical composition. In such methods, the mammal may have a mutation in one or both alleles of the cMyBP-C gene. Such methods, for example, reduce heart size, reduce cardiothoracic ratio, reduce end diastolic or end systolic left ventricular diameter, reduce anterior or posterior wall thickness, increase ejection time, increase aortic peak flow velocity or aortic flow time, and/or decrease symptoms of disease. In one or more embodiments, such methods reduce the frequency or severity of symptoms such as heart failure, arrhythmias, chest pain, shortness of breath, fatigue and dizziness.

[0375] In any of the methods described herein, the rAAV particle is delivered at a dose of about 1e12 to about 6e14 vg/kg in an aqueous suspension.

[0376] In any of the methods described herein, the administration of the vector construct, rAAV particle, or pharmaceutical composition may further comprise administration of prophylactic or therapeutic corticosteroid treatment, and/or may further include administration of a second therapeutic agent for treating HCM including but not limited to beta, blockers, calcium channel blockers, anti-arrhythmia drugs and small molecule inhibitors of cardiac myosin.

[0377] In any of the methods herein, prior to administration of an AAV particle to a patient as described above, the prospective patient may be assessed for the presence of anti-AAV capsid antibodies or anti-AAV neutralizing antibodies that are capable of blocking cell transduction or otherwise reduce the overall efficiency of the treatment.

### Detection of Anti-AAV Antibodies

[0378] To maximize the likelihood of successful cardiac transduction with systemic AAV-mediated therapeutic gene transfer, prior to administration of an AAV particle in a therapeutic regimen to a human patient as described above, the prospective patient may be assessed for the presence of anti-AAV capsid antibodies or anti-AAV neutralizing antibodies that are capable of blocking cell transduction or otherwise reduce the overall efficiency of the therapeutic regimen. Such antibodies may be present in the serum of the prospective patient and may be directed against an AAV capsid of any serotype. In one embodiment, the serotype against which pre-existing antibodies are directed is AAV5.

[0379] Methods to detect pre-existing AAV immunity are well known and routinely employed in the art and include cell-based in vitro transduction inhibition (TI) assays, in vivo (e.g., in mice) TI assays, and ELISA-based detection of total anti-capsid antibodies (tAb) (see, e.g., Masat et al., Discov. Med., vol. 15, pp. 379-389 and Boutin et al., (2010) Hum. Gene Ther., vol. 21, pp. 704-712). TI assays may employ host cells into which an AAV-inducible reporter vector has been previously introduced. The reporter vector may comprise an inducible reporter gene such as GFP, etc. whose expression is induced upon transduction of the host cell by an AAV virus. Anti-AAV capsid antibodies present in human serum that are capable of preventing/reducing host cell transduction would thereby reduce overall expression of the reporter gene in the system. Therefore, such assays may be employed to detect the presence of anti-AAV capsid antibodies in human serum that are capable of preventing/reducing cell transduction by the therapeutic AAV particle.

[0380] The assays to detect anti-AAV capsid antibodies may employ solid-phase-bound AAV capsid as a “capture agent” over which human serum is passed, thereby allowing anti-capsid antibodies present in the serum to bind to the solid-phase-bound capsid “capture agent”. Once washed to remove non-specific binding, a “detection agent” may be employed to detect the presence of anti-capsid antibodies bound to the capture agent. The detection agent may be an antibody, an AAV capsid, or the like, and may be detectably-labeled to aid in detection and quantitation of bound anti-capsid antibody. In one embodiment, the detection agent is labeled with ruthenium or a ruthenium-complex that may be detected using electrochemiluminescence techniques and equipment.

[0381] The same above-described methodology may be employed to assess and detect the generation of an anti-AAV capsid immune response in a patient previously treated with a therapeutic AAV virus of interest. As such, not only may these techniques be employed to assess the presence of anti-AAV capsid antibodies prior to treatment with a therapeutic AAV virus, they may also be employed to assess and measure the induction of an immune response against the administered therapeutic AAV virus after administration. As such, contemplated herein are methods that combine techniques for detecting anti-AAV capsid antibodies in human serum and administration of a therapeutic AAV virus for the treatment of HCM, wherein the techniques for detecting anti-AAV capsid antibodies in human serum may be performed either prior to or after administration of the therapeutic AAV virus.

[0382] Other aspects and advantages of the present disclosure will be understood upon consideration of the following illustrative examples.

### EXAMPLES

### Example 1: Production of AAV Particles

[0383] FIG. 1 shows the organization of the elements of vector constructs designated A1-A8 and C1-C5 SEQ ID NOS: 3-41 or 92-169, respectively, that comprise nucleic acid encoding human cMyBP-C. AAV particles comprising AAV9 capsid and vector constructs of SEQ ID NOS: 3-26 were produced in HEK293 cells and Sf9 cells. Vectors for AAV productions were generated. For example in AAV production with HEK293 cells, plasmids were generated. These plasmids have nucleotide sequences that provide the AAV vector genome, encode Rep and Capsid proteins, and provide non-helper AAV functions. These plasmids were transfected into HEK293 cells using a transfection reagent. After allowing the HEK293 to culture after transfection for a predetermined time, the produced rAAV particles were isolated from the culture, purified, and titered. For AAV production in Sf9 cells, bacmids were generated. These bacmids have nucleotide sequences that provide the AAV vector genome and encode Rep and Capsid proteins. The bacmids were transfected into naive Sf9 cells using a transfection reagent. After allowing the transfected Sf9 cells to culture for a predetermined time, recombinant baculovirus (rBV) was isolated, purified, and titered. To produce rAAV, another naive culture of Sf9 cells were infected with the rBV at a predetermined multiplicity of infection (MOI). The Sf9 cells were allowed to culture for a predetermined time post infection. After the predetermined time, the produced rAAV particles were isolated from the culture, purified, and titered.

### Example 2: Evaluation of Effect of AAV Particles in Engineered Heart Tissue

[0384] AAV9 particles prepared using the MYBPC3 vector constructs described herein were analyzed for their effect on human iPSC-derived cardiomyocytes in 2D and 3D formats. In the 2D format, exogenous protein and RNA content were measured, as well as suppression of mutant MYBPC3 transcripts (see Example 5 below). In the 3D format, effect on contractile function was also measured, including beating frequency, contractile force and kinetics.

[0385] A patient-specific human induced pluripotent stem cell (hiPSC) line carrying an heterozygous MYBPC3 truncating mutation was used to create, by CRISPR/Cas9 genome editing, two hiPSC lines: 1) cpHet carrying an additional homozygous MYBPC3 truncating mutation which lead to complete absence of MYBPC3 protein; and 2) isogenic control carrying two wild-type alleles leading to a normal level of MYBPC3 protein. See Warnecke et al., Generation of bi-allelic MYBPC3 truncating mutant and isogenic control from an iPSC line of a patient with hypertrophic cardiomyopathy. Stem Cell Res. 55 (2021): 102489.

[0386] AAV9 particles comprising the vector constructs described herein were tested by contact with human cardiomyocytes (CM) derived from the cpHet hiPSC line and the isogenic control hiPSC line, in 2D and engineered heart tissue (EHT) formats.

[0387] The hiPSC cardiomyocytes (hiPSC-CM) were prepared by passaging the cpHet or isogenic control hiPSC cells, dissociating the hiPSC cells, and boosting cardiac differentiation with the use of different media over 14 days. The differentiated cardiomyocytes were cultured in a 2D monolayer or as 3D engineered heart tissue (EHT). EHTs were prepared by embedding 1 Million hiPSC-CMs into a fibrin matrix generally as described in Breckwoldt K, et al. Differentiation of cardiomyocytes and generation of human engineered heart tissue. Nat Protoc 12, 1177-1197 (2017) and Hansen et al., Development of a drug screening platform based on engineered heart tissue. Circ. Res. 107.1 (2010): 35-44.

[0388] Briefly, slots for EHTs with spacers are placed in a 24-well plate filled with 2%-agarose (1.6 ml/well). When the agarose is solid, the spacers are removed and the silicone racks placed with one pair of posts into each mold. For each EHT casting, approximately 1 million hiPSC-CMs are used in a master medium containing horse serum, Y-27632 (Biorbyt, orb154626), fibrinogen, L-glutamine, DMEM, penicillin/streptomycin and thrombin. The hiPSC-CMs and casting medium are placed in the agarose slots. After 1.5 hours, EHTs solidify around the silicone racks and are moved to medium-filled culture plates. EHTs are then maintained at 37° C., 7% CO₂, 40% O₂ and 98% relative humidity.

[0389] For transduction with AAV, HiPSC-CM in 2D were re-plated and cultured as adherent cells with 220K cells per 24 well plate or 20K cells per 96 well plate. 2D cpHet hiPSC-CM were transduced about 4 days after re-plating by addition of AAV particles (at a multiplicity of infection (MOI) of 300K) into the culture medium. cpHet EHT were transduced about 2 weeks after generation by addition of AAV particles (multiplicity of infection (MOI) of 300K) into the tissue medium.

[0390] The expression of human cMyBP-C protein was detected 7 or 14 days after transduction for 2D and 3D EHT formats, respectively. Briefly, 2D or EHT hiPSC-CM were harvested to extract proteins for further analysis. Whole protein lysates were used to measure exogenous protein levels by Western blot utilizing custom-made antibody against hMYBPC3. Alpha-actinin and/or cTnT protein level was used as reference. No MYBPC3 was detected in untransduced cpHet hiPSC-CMs. After transduction with AAV9 particles, exogenous MYBPC3 protein was detected, and protein levels were depicted as fold-increase over isogenic control. Results are shown in FIG. 2 and show that at least a 2.5-fold increase in expression was achieved with A2, A3, A4, A6, with A6 achieving the highest increase, and at least a 0.1-1.0-fold increase in expression was achieved with C1, C2, C4 and C5, with C3 achieving the highest increase. Testing of additional AAV9 particles comprising vectors constructs described herein, produced in HEK293 cells or in Sf9 derived cells, resulted in an even higher 5-12 fold-change over isogenic control as analyzed by Western blot.

[0391] In the 3D EHT format, the effect on spontaneous beating frequency and on contractile function was evaluated after administration of the AAV9-MYBPC3 vector constructs described herein. For evaluating contractile function, the engineered heart tissue was stimulated to contract and relax. The hiPSC-CMs in EHT format exhibit intrinsic spontaneous contractility starting 1-2 weeks after generation. For spontaneous beating frequency as functional endpoint, the intrinsic spontaneous contraction frequency was analyzed without further stimulation.

[0392] Spontaneous beating activity was evaluated in low glucose DMEM medium with 1.8 mM calcium and was measured 1 week post transduction. Higher spontaneous beating frequency was consistently observed in cpHet EHTs compared to isogenic control EHT. The goal of gene therapy with AAV9 particles containing the vector constructs described herein was to reduce this abnormally high frequency. The frequency was analyzed over time in complete medium, and in serum-free DMEM one and two weeks after transduction. Constructs A2, A3, A4, A5 and A6 resulted in reversion of abnormal phenotype to normal phenotype. Specifically, constructs A3, A4 and A6 showed the best and most consistent decrease in beating rate (BPM). In contrast, construct A5 showed only a slight effect on beating rate.

[0393] Contractile function was evaluated at a fixed beating frequency by pacing using electrical stimulation. See Hirt et al., Functional improvement and maturation of rat and human engineered heart tissue by chronic electrical stimulation. J. Molec. Cell. Cardiol. 74 (2014): 151-161. One or 2 weeks after transduction, short term electrical pacing (1 Hz, 2.5 V) in medium containing 1.8 mM calcium was employed to evaluate the endpoints under fixed frequencies with Baseline Force as confirmatory QC endpoint, and contraction kinetics as functional endpoints (relative late relaxation time, RT_{20%} and RT_{80%}). The transduction procedure was optimized to provide stable force development with no significant difference between cpHet non-transduced (NT) and EHTs transduced with vectors by adjusting time point, transduction medium and transduction chambers.

[0394] After activation, the contractile force of the myocytes in engineered heart tissue was measured. Contractile force and kinetics of EHTs was monitored in the EHT test system combining a semi-automated video optical analysis with a figure recognition software. The force (mN) development over time (sec) was calculated by the delta of silicone post distance (post deflection) with known elastic modulus of Sylgard 184 (2.6 kPa). For depiction of normalized average peaks, baseline was set to 0% and peak force to 100% for each EHT. Non-transduced (NT) cpHet EHTs were compared with transduced cpHet and isogenic control EHTs and normalized. Results are shown in FIG. 3.

[0395] The relaxation time and rate were measured from peak sarcomere contraction to re-lengthening. Recorded contractions are identified by peak criteria. Based on identified contractions, values for frequency, average force, fractional shortening, contraction (Time to peak)—and relaxation time (RT) were calculated. Relaxation time percentage represents time needed from maximum post deflection to baseline in percentage, e.g., with RT20% representing the time (sec) from maximum (100%) to 80% post deflection. From absolute RTs, relative late RT (fraction or %)=RT80%−RT50%/RT80% was calculated. The relative percentage of late relaxation time is shown in FIG. 4A. The relaxation time to 20% or 80% of re-lengthening (seconds) is shown in FIGS. 4B and 4C, respectively. cpHet show a consistently higher fraction of relative late RT (RT80%−RT50%/RT80%) compared to isogenic control. The goal of gene therapy is to normalize contractile kinetics, including by lowering the abnormally high relative late RT.

[0396] The effect on contractile function was assessed for AAV9 particles containing various MYBPC3 vector constructs that were produced in HEK293 cells, Sf9 and Sf9 derived cells. cpHet EHTs transduced with AAV9-MYBPC3 were compared I week after transduction with time-matched isogenic control EHTs. Most of the tested vector constructs, for example, A2, A3, A4, A5, A6 and C3, reverted the abnormally high relative late RT to closer to normal phenotype. The effect on contractile function of AAV9 particles produced in HEK293 cells was superior to particles produced in Sf9 cells. A3, A4, A5 and A6 had the greatest effect and completely reverted the abnormally high relative late RT.

[0397] Absolute relaxation time was also evaluated. cpHet EHTs exhibit a significantly shorter absolute relaxation time for both 20% and 80% (RT_{20%} and RT_{80%}) compared to isogenic control. Tested vector constructs, for example, A2, A3, A4, A5, A6 and C3 significantly lengthened the abnormally short RTs. Treatment of cpHet EHT cardiomyocytes with AAV particles produced in HEK293 cells showed the most apparent restoration for both (RT_{20%} and RT_{80%}) compared to non-transduced cpHet EHT cardiomyocytes. Construct A6 had a statistically significant effect on both RT_{20%} and RT_{80%}. Vector A6-transduced EHTs exhibited both a significantly longer RT_{20%} and a longer RT_{80%}.

[0398] Additionally, normalized average contraction peaks of AAV-transduced cpHet EHT were analyzed and compared to normalized average contraction peaks from cpHet and isogenic control EHTs. Some effects were seen for all test vectors, e.g., A2, A3, A4, A5, A6 and C3 consistently having the greatest effect. AAV9 particles comprising vector construct A6 produced in HEK293 cells resulted in complete normalization of contractile kinetics. cpHet EHTs transduced with AAV9 particles containing vector constructs A3 and A6, produced in HEK293 derived cells, improved relaxation kinetics towards the isogenic control. As shown in FIG. 4D, the normalization force % of cells transduced with A3 and A6 produced in HEK293 cells (Group 3) was significantly greater than the normalization force % of cells transduced with A3 and A6 produced in insect cells (Group 4). Overall, AAV9 particles produced in mammalian cells showed superior activity in improving contractile function and contractile kinetics compared to AAV9 particles produced in insect cells.

### Example 3: Evaluation of Effect of AAV Particles In Vivo

[0399] Mice (n=10) were administered AAV particles prepared as in Example 1 at doses of 2e14 vg/kg and heart tissue was collected at 8 weeks.

[0400] The number of vector genomes encoding human cMyBP-C was assessed by ddPCR. Results (vector genomes per number of diploid gene) are shown in FIG. 5A. All of the AAV particles tested provided effective delivery of at least one copy of the gene encoding human cMyBP-C per cell.

[0401] The number of human cMyBP-C mRNA transcripts was assessed by ddPCR. Results (mRNA transcripts per RPLP0 ribosomal protein transcript) are shown in FIG. 5B. All of the AAV particles tested provided effective translation into mRNA, with A2 and A4 providing highest levels.

[0402] The amount of cMyBP-C protein was determined by liquid chromatography/mass spectrometry (LC/MS). Results (ug/gram of heart tissue and percentage of human cMyBP-C of total cMyBP-C protein in murine heart) are shown in FIG. 5C.

[0403] Heart tissue was stained with antibodies specific for human cMyBP-C and ASG (a-sarcoglycan, a muscle cell membrane marker). Intact cell nuclei were also stained with DAPI. There was widespread detection of cMyBP-C protein throughout a majority of cardiomyocytes, with 77% and 65% of cardiomyocytes positive for cMyBP-C in preparations from mice administered A5, A6 and C3, respectively. See FIG. 6.

[0404] Heart tissue was also stained with antibodies specific for human cMyBP-C and for actin which is present in the sarcomeres. The human cMyBP-C protein was observed to localize to the sarcomere.

[0405] The results indicate that A5 and A6 vector constructs provided effective delivery of human cMyBP-C protein to the mice administered AAV particles comprising these vector constructs, and that the human cMyBP-C protein was effectively incorporated into the majority of cardiomyocyte sarcomeres. The integration of the functional human cMyBP-C protein is expected to improve contractility and reduce hypertrophic cardiomyopathy and its associated symptoms.

### Example 4: Further Evaluation of Effect of AAV Particles In Vivo

[0406] Various doses of rAAV particles comprising the vector constructs described herein are administered to MYBPC3 KO mice to evaluate correction of a HCM phenotype which includes hypertrophy and cardiac dysfunction. Echocardiography will be used to monitor the functional correction of these mice throughout the length of the study and upon study completion, heart tissues will be used to evaluate transduction and expression of the vector construct.

### Example 5: Evaluation of Mutant MYBPC3 mRNA Levels

[0407] The effect of AAV9 particles containing vector constructs described herein on mutant MYBPC3 mRNA levels was also evaluated in 2D hiPSC-CM prepared as described in Example 2.

[0408] Semi-quantitative RT-PCR was performed to monitor effect on mutant MYBPC3 mRNAs. RT-PCR with primers around the MYBPC3 c.2308G>A mutation site showed only one band at 912 bp in the isogenic control CM, corresponding to the wild-type mRNA, and two additional mRNA bands of bigger size compared to wild-type band (i.e., 912 bp) in the non-transduced CpHet CM. The accumulation of these two aberrant MYBPC3 mRNAs resulting from the endogenous mutated gene was prevented by transduction with the AAV9-MYBPC3 vector constructs as described herein, e.g., A1, A2, A3, A4, A5, A6. C1, C4 and C5 had the least effect on the mutant mRNA bands.

[0409] Cardiovascular safety and toxicology studies will be performed in relevant models. Dose-response studies to determine % transduced/protein expression in MYBPC3−/− mice to inform dose selection will be conducted.

[0410] The embodiments described herein are intended to be merely exemplary, and those skilled in the art will recognize, or will be able to ascertain using no more than routine experimentation, numerous equivalents of specific constructs, materials, and procedures. All such equivalents are considered to be within the scope of the disclosure.

[0411] All of the patents, patent applications and publications referred to herein are incorporated by reference herein in their entireties. Citation or identification of any reference in this application is not an admission that such reference is available as prior art to this application. The full scope of the disclosure is better understood with reference to the appended claims.

1. A recombinant vector construct comprising:
a nucleic acid encoding a functional human cardiac myosin binding protein C (cMyBP-C) comprising an amino acid sequence at least 95% identical to SEQ ID NO: 2, or complement thereof, operably linked to:
a heterologous cardiomyocyte-specific transcription regulatory region comprising a fragment or variant of a hTNNT2 promoter,
a polyadenylation signal, and
one or both of 5′ and 3′ AAV inverted terminal repeat (ITR) sequences.

2-5. (canceled)

6. The vector construct of claim 1, wherein the cardiomyocyte-specific transcription regulatory region comprises:
a cardiomyocyte-specific promoter comprising a nucleotide sequence at least 80% identical to any one of SEQ ID NOs: 47-52 or a fragment or complement thereof, and
an intron comprising a nucleotide sequence at least 60% identical to any of SEQ ID NOs: 53, 56 or 58 or complement thereof, wherein the intron is 5′ to the nucleic acid encoding a functional human cMyBP-C.

7. The vector construct of claim 6 comprising a fragment of an exon.

8. The vector construct of claim 7, wherein the exon comprises the nucleotide sequence of SEQ ID NO: 54 or complement thereof.

9. The vector construct of claim 7, comprising the nucleotide sequence of SEQ ID NO: 56 or complement thereof.

10. The vector construct of claim 1, further comprising an intron.

11. The vector construct of claim 10, wherein the intron comprises a nucleotide sequence at least 60% identical to SEQ ID NO: 53 or SEQ ID NO: 58 or complements thereof.

12. The vector construct of claim 10, wherein the intron is located within the nucleic acid encoding a functional human cMyBP-C.

13. The vector construct of claim 10, wherein the intron is located between two exons of the nucleic acid encoding a functional human -MyBP-C.

14. The vector construct of claim 10, wherein the intron is located between exon 2 and exon 3 of the nucleic acid encoding a functional human cMyBP-C.

15. The vector construct of claim 10, wherein the intron is located at position 293 of SEQ ID NO: 1 or 42-45.

16-27. (canceled)

28. The vector construct of claim 1, wherein the polyadenylation signal comprises a nucleotide sequence at least 90% identical to SEQ ID NO: 64 or complement thereof.

29. The vector construct of claim 1, wherein the polyadenylation signal is a bovine growth hormone polyadenylation signal or fragment thereof.

30. The vector construct of claim 29, wherein the polyadenylation signal comprises a nucleotide sequence at least 90% identical to any of SEQ ID NOs: 59-61 or complements thereof.

31. The vector construct of claim 1 wherein the polyadenylation signal is a human growth hormone polyadenylation signal or fragment thereof.

32. The vector construct of claim 31, wherein the polyadenylation signal comprises a nucleotide sequence at least 90% identical to any of SEQ ID NOs: 62 or fragment or complement thereof.

33. (canceled)

34. (canceled)

35. The vector construct of claim 1 comprising a nucleotide sequence at least 97%, 98% or 99% identical to any of SEQ ID NO: 3-41 or 92-169 or complements thereof.

36. An rAAV particle comprising the vector construct of claim 1 and an AAV capsid, wherein the AAV capsid has cardiac tropism.

37-40. (canceled)

41. A method of producing an rAAV particle comprising the steps of:
(a) providing a cell permissive for AAV replication with one or more nucleic acid constructs comprising:
(i) a recombinant vector construct comprising (1) at least one AAV ITR, (2) a heterologous cardiomyocyte-specific transcription regulatory region, and (3) a nucleic acid encoding a functional human cardiac myosin binding protein C,
(ii) a nucleotide sequence encoding one or more AAV Rep proteins which is operably linked to a promoter that is capable of driving expression of the Rep protein(s) in the cell; and
(iii) a nucleotide sequence encoding one or more AAV capsid proteins which is operably linked to a promoter that is capable of driving expression of the capsid protein(s) in the cell;
(b) culturing the cell under conditions permitting expression of the Rep and the capsid proteins; and
(c) recovering the rAAV particle.

42-45. (canceled)

46. A pharmaceutical composition comprising the rAAV particle of claim 36 in an aqueous suspension with a sterile pharmaceutically acceptable excipient.

47-49. (canceled)

The application's sequence listing, which the Patent Office published only in electronic form, follows.

SEQUENCE LISTING (169 sequences)

SEQ ID NO: 1 - DNA, 4200 bp, Homo sapiens
  source 1..4200: mol_type = genomic DNA
catggtgagtgcctggtgtgacgtctctcaggatgcctgagccggggaagaagccagtctcagcctttagcaagaagccacggtcagtggaagtggccgcaggcagccctgccgtgttcgaggccgagacagagcgggcaggagtgaaggtgcgctggcagcgcggaggcagtgacatcagcgccagcaacaagtacggcctggccacagagggcacacggcatacgctgacagtgcgggaagtgggccctgccgaccagggatcttacgcagtcattgctggctcctccaaggtcaagttcgacctcaaggtcatagaggcagagaaggcagagcccatgctggcccctgcccctgcccctgctgaggccactggagcccctggagaagccccggccccagccgctgagctgggagaaagtgccccaagtcccaaagggtcaagctcagcagctctcaatggtcctacccctggagcccccgatgaccccattggcctcttcgtgatgcggccacaggatggcgaggtgaccgtgggtggcagcatcaccttctcagcccgcgtggccggcgccagcctcctgaagccgcctgtggtcaagtggttcaagggcaaatgggtggacctgagcagcaaggtgggccagcacctgcagctgcacgacagctacgaccgcgccagcaaggtctatctgttcgagctgcacatcaccgatgcccagcctgccttcactggcagctaccgctgtgaggtgtccaccaaggacaaatttgaatgctccaacttcaatctcactgtccacgaggccatgggcaccggagacctggacctcctatcagccttccgccgcacgagcctggctggaggtggtcggcggatcagtgatagccatgaggacactgggattctggacttcagctcactgctgaaaaagagagacagtttccggaccccgagggactcgaagctggaggcaccagcagaggaggacgtgtgggagatcctacggcaggcacccccatctgagtacgagcgcatcgccttccagtacggcgtcactgacctgcgcggcatgctaaagaggctcaagggcatgaggcgcgatgagaagaagagcacagcctttcagaagaagctggagccggcctaccaggtgagcaaaggccacaagatccggctgaccgtggaactggctgaccatgacgctgaggtcaaatggctcaagaatggccaggagatccagatgagcggcagcaagtacatctttgagtccatcggtgccaagcgtaccctgaccatcagccagtgctcattggcggacgacgcagcctaccagtgcgtggtgggtggcgagaagtgtagcacggagctctttgtgaaagagccccctgtgctcatcacgcgccccttggaggaccagctggtgatggtggggcagcgggtggagtttgagtgtgaagtatcggaggagggggcgcaagtcaaatggctgaaggacggggtggagctgacccgggaggagaccttcaaataccggttcaagaaggacgggcagagacaccacctgatcatcaacgaggccatgctggaggacgcggggcactatgcactgtgcactagcgggggccaggcgctgcgtgagctcattgtgcaggaaaagaagctggaggtgtaccagagcatcgcagacctgatggtgggcgcaaaggaccaggcggtgttcaaatgtgaggtctcagatgagaatgttcggggtgtgtggctgaagaatgggaaggagctggtgcccgacagccgcataaaggtgtcccacatcgggcgggtccacaaactgaccattgacgacgtcacacctgccgacgaggctgactacagctttgtgcccgagggcttcgcctgcaacctgtcagccaagctccacttcatggaggtcaagattgacttcgtacccaggcaggaacctcccaagatccacctggactgcccaggccgcataccagacaccattgtggttgtagctggaaataagctacgtctggacgtccctatctctggggaccctgctcccactgtgatctggcagaaggctatcacgcaggggaataaggccccagccaggccagccccagatgccccagaggacacaggtgacagcgatgagtgggtgtttgacaagaagctgctgtgtgagaccgagggccgggtccgcgtggagaccaccaaggaccgcagcatcttcacggtcgagggggcagagaaggaagatgagggcgtctacacggtcacagtgaagaaccctgtgggcgaggaccaggtcaacctcacagtcaaggtcatcgacgtgccagacgcacctgcggcccccaagatcagcaacgtgggagaggactcctgcacagtacagtgggagccgcctgcctacgatggcgggcagcccatcctgggctacatcctggagcgcaagaagaagaagagctaccggtggatgcagctgaacttcgacctgattcaggagctgagtcatgaagcgcggcgcatgatcgagggcgtggtgtacgagatgcgcgtctacgcggtcaacgccatcggcatgtccaggcccagccctgcctcccagcccttcatgcctatcggtccccccagcgaacccacccacctggcagtagaggacgtctctgacaccacggtctccctcaagtggcggcccccagagcgcgtgggagcaggaggcctggatggctacagcgtggagtactgcccagagggctgctcagagtgggtggctgccctgcaggggctgacagagcacacatcgatactggtgaaggacctgcccacgggggcccggctgcttttccgagtgcgggcacacaatatggcagggcctggagcccctgttaccaccacggagccggtgacagtgcaggagatcctgcaacggccacggcttcagctgcccaggcacctgcgccagaccattcagaagaaggtcggggagcctgtgaaccttctcatccctttccagggcaagccccggcctcaggtgacctggaccaaagaggggcagcccctggcaggcgaggaggtgagcatccgcaacagccccacagacaccatcctgttcatccgggccgctcgccgcgtgcattcaggcacttaccaggtgacggtgcgcattgagaacatggaggacaaggccacgctggtgctgcaggttgttgacaagccaagtcctccccaggatctccgggtgactgacgcctggggtcttaatgtggctctggagtggaagccaccccaggatgtcggcaacacggaactctgggggtacacagtgcagaaagccgacaagaagaccatggagtggttcaccgtcttggagcattaccgccgcacccactgcgtggtgccagagctcatcattggcaatggctactacttccgcgtcttcagccagaatatggttggctttagtgacagagcggccaccaccaaggagcccgtctttatccccagaccaggcatcacctatgagccacccaactataaggccctggacttctccgaggccccaagcttcacccagcccctggtgaaccgctcggtcatcgcgggctacactgctatgctctgctgtgctgtccggggtagccccaagcccaagatttcctggttcaagaatggcctggacctgggagaagacgcccgcttccgcatgttcagcaagcagggagtgttgactctggagattagaaagccctgcccctttgacgggggcatctatgtctgcagggccaccaacttacagggcgaggcacggtgtgagtgccgcctggaggtgcgagtgcctcagtgaccaggctggctcctggggatggccaggtacaaccggatgccagccccgtgccaggagcctggagggaagttggggaaacccctccctactgttggatgtatgtgtgacaagtgtgtctcctgtgctgcgatgggggatcagcagggcagttgtcgggcagtcctgagtgggtgttgcacagactggtccacagggctcctgaaggaagcccctggatctttggggtaaaaggagggtggcctcaagaaacaatgtctggggacaggcctttctggcctgctatgtcttcccaatgtttattgggcaataaaagataagtgcagtcacagagaactcactcttc

SEQ ID NO: 2 - protein, 1274 aa, Homo sapiens
MPEPGKKPVSAFSKKPRSVEVAAGSPAVFEAETERAGVKVRWQRGGSDISASNKYGLATEGTRHTLTVREVGPADQGSYAVIAGSSKVKFDLKVIEAEKAEPMLAPAPAPAEATGAPGEAPAPAAELGESAPSPKGSSSAALNGPTPGAPDDPIGLFVMRPQDGEVTVGGSITFSARVAGASLLKPPVVKWFKGKWVDLSSKVGQHLQLHDSYDRASKVYLFELHITDAQPAFTGSYRCEVSTKDKFECSNFNLTVHEAMGTGDLDLLSAFRRTSLAGGGRRISDSHEDTGILDFSSLLKKRDSFRTPRDSKLEAPAEEDVWEILRQAPPSEYERIAFQYGVTDLRGMLKRLKGMRRDEKKSTAFQKKLEPAYQVSKGHKIRLTVELADHDAEVKWLKNGQEIQMSGSKYIFESIGAKRTLTISQCSLADDAAYQCVVGGEKCSTELFVKEPPVLITRPLEDQLVMVGQRVEFECEVSEEGAQVKWLKDGVELTREETFKYRFKKDGQRHHLIINEAMLEDAGHYALCTSGGQALRELIVQEKKLEVYQSIADLMVGAKDQAVFKCEVSDENVRGVWLKNGKELVPDSRIKVSHIGRVHKLTIDDVTPADEADYSFVPEGFACNLSAKLHFMEVKIDFVPRQEPPKIHLDCPGRIPDTIVVVAGNKLRLDVPISGDPAPTVIWQKAITQGNKAPARPAPDAPEDTGDSDEWVFDKKLLCETEGRVRVETTKDRSIFTVEGAEKEDEGVYTVTVKNPVGEDQVNLTVKVIDVPDAPAAPKISNVGEDSCTVQWEPPAYDGGQPILGYILERKKKKSYRWMQLNFDLIQELSHEARRMIEGVVYEMRVYAVNAIGMSRPSPASQPFMPIGPPSEPTHLAVEDVSDTTVSLKWRPPERVGAGGLDGYSVEYCPEGCSEWVAALQGLTEHTSILVKDLPTGARLLFRVRAHNMAGPGAPVTTTEPVTVQEILQRPRLQLPRHLRQTIQKKVGEPVNLLIPFQGKPRPQVTWTKEGQPLAGEEVSIRNSPTDTILFIRAARRVHSGTYQVTVRIENMEDKATLVLQVVDKPSPPQDLRVTDAWGLNVALEWKPPQDVGNTELWGYTVQKADKKTMEWFTVLEHYRRTHCVVPELIIGNGYYFRVFSQNMVGFSDRAATTKEPVFIPRPGITYEPPNYKALDFSEAPSFTQPLVNRSVIAGYTAMLCCAVRGSPKPKISWFKNGLDLGEDARFRMFSKQGVLTLEIRKPCPFDGGIYVCRATNLQGEARCECRLEVRVPQ

SEQ ID NO: 3 - DNA, 4786 bp, synthetic construct
  source 1..4786: mol_type = other DNA
ctggaagatgtctttacccccagcatcagttcaagtggagcagcacataactcttgccctctgccttccaagattctggtgctgagacttatggagtgtcttggaggttgccttctgccccccaaccctgctcccagctggccctcccaggcctgggttgctggcctctgctttatcaggattctcaagagggacagctggtttatgttgcatgactgttccctgcatatctgctctggttttaaatagcttatctgagcagctggaggaccacatgggcttatatggcgtggggtacatgttcctgtagccttgtccctggcacctgccaaaatagcagccaacaccccccacccccaccgccatccccctgccccacccgtcccctgtcgcacattcctccctccgcagggctggctcaccaggccccagcccacatgcctgcttaaagccctctccatcctctgcctcacccagtccccgctgagactgagcagacgcctccaggatctgtcggcagctgctgttctgaggtaagtactagcagctacaatccagctaccattctgcttttattttatggttgggataaggctggattattctgagtccaagctaggcccttttgctaatcatgttcatacctcttatcttcctcccacagctcctgggcaacgtgctggtctgtgtgctggcccatcactttggcaaagaattgcgatcgccaccatgcctgagccggggaagtaagccagtctcagctttagcaagaagccacggtcagtggaagtggccgcaggcagccctgccgtgttcgaggccgagacagagcgggcaggagtgaaggtgcgctggcagcgcggaggcagtgacatcagcgccagcaacaagtacggcctggccacagagggcacacggcatacgctgacagtgcgggaagtgggccctgccgaccagggatcttacgcagtcattgctggctcctccaaggtcaagttcgacctcaaggtcatagaggcagagaaggcagagcccatgctggcccctgcccctgcccctgctgaggccactggagcccctggagaagccccggccccagccgctgagctgggagaaagtgccccaagtcccaaagggtcaagctcagcagctctcaatggtcctacccctggagcccccgatgaccccattggcctcttcgtgatgcggccacaggatggcgaggtgaccgtgggtggcagcatcaccttctcagcccgcgtggccggcgccagcctcctgaagccgcctgtggtcaagtggttcaagggcaaatgggtggacctgagcagcaaggtgggccagcacctgcagctgcacgacagctacgaccgcgccagcaaggtctatctgttcgagctgcacatcaccgatgcccagcctgccttcactggcagctaccgctgtgaggtgtccaccaaggacaaatttgactgctccaacttcaatctcactgtccacgaggccatgggcaccggagacctggacctcctatcagccttccgccgcacgagcctggctggaggtggtcggcggatcagtgatagccatgaggacactgggattctggacttcagctcactgctgaaaaagagagacagtttccggaccccgagggactcgaagctggaggcaccagcagaggaggacgtgtgggagatcctacggcaggcacccccatctgagtacgagcgcatcgccttccagtacggcgtcactgacctgcgcggcatgctaaagaggctcaagggcatgaggcgcgatgagaagaagagcacagcctttcagaagaagctggagccggcctaccaggtgagcaaaggccacaagatccggctgaccgtggaactggctgaccatgacgctgaggtcaaatggctcaagaatggccaggagatccagatgagcggcagcaagtacatctttgagtccatcggtgccaagcgtaccctgaccatcagccagtgctcattggcggacgacgcagcctaccagtgcgtggtgggtggcgagaagtgtagcacggagctctttgtgaaagagccccctgtgctcatcacgcgccccttggaggaccagctggtgatggtggggcagcgggtggagtttgagtgtgaagtatcggaggagggggcgcaagtcaaatggctgaaggacggggtggagctgacccgggaggagaccttcaaataccggttcaagaaggacgggcagagacaccacctgatcatcaacgaggccatgctggaggacgcggggcactatgcactgtgcactagcgggggccaggcgctggctgagctcattgtgcaggaaaagaagctggaggtgtaccagagcatcgcagacctgatggtgggcgcaaaggaccaggcggtgttcaaatgtgaggtctcagatgagaatgttcggggtgtgtggctgaagaatgggaaggagctggtgcccgacagccgcataaaggtgtcccacatcgggcgggtccacaaactgaccattgacgacgtcacacctgccgacgaggctgactacagctttgtgcccgagggcttcgcctgcaacctgtcagccaagctccacttcatggaggtcaagattgacttcgtacccaggcaggaacctcccaagatccacctggactgcccaggccgcataccagacaccattgtggttgtagctggaaataagctacgtctggacgtccctatctctggggaccctgctcccactgtgatctggcagaaggctatcacgcaggggaataaggccccagccaggccagccccagatgccccagaggacacaggtgacagcgatgagtgggtgtttgacaagaagctgctgtgtgagaccgagggccgggtccgcgtggagaccaccaaggaccgcagcatcttcacggtcgagggggcagagaaggaagatgagggcgtctacacggtcacagtgaagaaccctgtgggcgaggaccaggtcaacctcacagtcaaggtcatcgacgtgccagacgcacctgcggcccccaagatcagcaacgtgggagaggactcctgcacagtacagtgggagccgcctgcctacgatggcgggcagcccatcctgggctacatcctggagcgcaagaagaagaagagctaccggtggatgcggctgaacttcgacctgattcaggagctgagtcatgaagcgcggcgcatgatcgagggcgtggtgtacgagatgcgcgtctacgcggtcaacgccatcggcatgtccaggcccagccctgcctcccagcccttcatgcctatcggtccccccagcgaacccacccacctggcagtagaggacgtctctgacaccacggtctccctcaagtggcggcccccagagcgcgtgggagcaggaggcctggatggctacagcgtggagtactgcccagagggctgctcagagtgggtggctgccctgcaggggctgacagagcacacatcgatactggtgaaggacctgcccacgggggcccggctgcttttccgagtgcgggcacacaatatggcagggcctggagcccctgttaccaccacggagccggtgacagtgcaggagatcctgcaacggccacggcttcagctgcccaggcacctgcgccagaccattcagaagaaggtcggggagcctgtgaaccttctcatccctttccagggcaagccccggcctcaggtgacctggaccaaagaggggcagcccctggcaggcgaggaggtgagcatccgcaacagccccacagacaccatcctgttcatccgggccgctcgccgcgtgcattcaggcacttaccaggtgacggtgcgcattgagaacatggaggacaaggccacgctggtgctgcaggttgttgacaagccaagtcctccccaggatctccgggtgactgacgcctggggtcttaatgtggctctggagtggaagccaccccaggatgtcggcaacacggagctctgggggtacacagtgcagaaagccgacaagaagaccatggagtggttcaccgtcttggagcattaccgccgcacccactgcgtggtgccagagctcatcattggcaatggctactacttccgcgtcttcagccagaatatggttggctttagtgacagagcggccaccaccaaggagcccgtctttatccccagaccaggcatcacctatgagccacccaactataaggccctggacttctccgaggccccaagcttcacccagcccctggtgaaccgctcggtcatcgcgggctacactgctatgctctgctgtgctgtccggggtagccccaagcccaagatttcctggttcaagaatggcctggacctgggagaagacgcccgcttccgcatgttcagcaagcagggagtgttgactctggagattagaaagccctgcccctttgacgggggcatctatgtctgcagggccaccaacttacagggcgaggcacggtgtgagtgccgcctggaggtgcgagtgcctcagtgacctcgagctgtgccttctagttgccagccatctgttgtttgcccctcccccgtgccttccttgaccctggaaggtgccactcccactgtcctttcctaataaaatgaggaaattgcatcgcattgtctgagtaggtgtcattctattctggggggtggggtggggcaggacagcaagggggaggattgggaagacaatagcaggcatgctggggatgcggtgggctctatgg

SEQ ID NO: 4 - DNA, 5104 bp, synthetic construct
  source 1..5104: mol_type = other DNA
ttggccactccctctctgcgcgctcgctcgctcactgaggccgcccgggcaaagcccgggcgtcgggcgacctttggtcgcccggcctcagtgagcgagcgagcgcgcagagagggagtggccaactccatcactaggggttcctgcggccgcacgcgtctggaagatgtctttacccccagcatcagttcaagtggagcagcacataactcttgccctctgccttccaagattctggtgctgagacttatggagtgtcttggaggttgccttctgccccccaaccctgctcccagctggccctcccaggcctgggttgctggcctctgctttatcaggattctcaagagggacagctggtttatgttgcatgactgttccctgcatatctgctctggttttaaatagcttatctgagcagctggaggaccacatgggcttatatggcgtggggtacatgttcctgtagccttgtccctggcacctgccaaaatagcagccaacaccccccacccccaccgccatccccctgccccacccgtcccctgtcgcacattcctccctccgcagggctggctcaccaggccccagcccacatgcctgcttaaagccctctccatcctctgcctcacccagtccccgctgagactgagcagacgcctccaggatctgtcggcagctgctgttctgaggtaagtactagcagctacaatccagctaccattctgcttttattttatggttgggataaggctggattattctgagtccaagctaggcccttttgctaatcatgttcatacctcttatcttcctcccacagctcctgggcaacgtgctggtctgtgtgctggcccatcactttggcaaagaattgcgatcgccaccatgcctgagccggggaagtaagccagtctcagctttagcaagaagccacggtcagtggaagtggccgcaggcagccctgccgtgttcgaggccgagacagagcgggcaggagtgaaggtgcgctggcagcgcggaggcagtgacatcagcgccagcaacaagtacggcctggccacagagggcacacggcatacgctgacagtgcgggaagtgggccctgccgaccagggatcttacgcagtcattgctggctcctccaaggtcaagttcgacctcaaggtcatagaggcagagaaggcagagcccatgctggcccctgcccctgcccctgctgaggccactggagcccctggagaagccccggccccagccgctgagctgggagaaagtgccccaagtcccaaagggtcaagctcagcagctctcaatggtcctacccctggagcccccgatgaccccattggcctcttcgtgatgcggccacaggatggcgaggtgaccgtgggtggcagcatcaccttctcagcccgcgtggccggcgccagcctcctgaagccgcctgtggtcaagtggttcaagggcaaatgggtggacctgagcagcaaggtgggccagcacctgcagctgcacgacagctacgaccgcgccagcaaggtctatctgttcgagctgcacatcaccgatgcccagcctgccttcactggcagctaccgctgtgaggtgtccaccaaggacaaatttgactgctccaacttcaatctcactgtccacgaggccatgggcaccggagacctggacctcctatcagccttccgccgcacgagcctggctggaggtggtcggcggatcagtgatagccatgaggacactgggattctggacttcagctcactgctgaaaaagagagacagtttccggaccccgagggactcgaagctggaggcaccagcagaggaggacgtgtgggagatcctacggcaggcacccccatctgagtacgagcgcatcgccttccagtacggcgtcactgacctgcgcggcatgctaaagaggctcaagggcatgaggcgcgatgagaagaagagcacagcctttcagaagaagctggagccggcctaccaggtgagcaaaggccacaagatccggctgaccgtggaactggctgaccatgacgctgaggtcaaatggctcaagaatggccaggagatccagatgagcggcagcaagtacatctttgagtccatcggtgccaagcgtaccctgaccatcagccagtgctcattggcggacgacgcagcctaccagtgcgtggtgggtggcgagaagtgtagcacggagctctttgtgaaagagccccctgtgctcatcacgcgccccttggaggaccagctggtgatggtggggcagcgggtggagtttgagtgtgaagtatcggaggagggggcgcaagtcaaatggctgaaggacggggtggagctgacccgggaggagaccttcaaataccggttcaagaaggacgggcagagacaccacctgatcatcaacgaggccatgctggaggacgcggggcactatgcactgtgcactagcgggggccaggcgctggctgagctcattgtgcaggaaaagaagctggaggtgtaccagagcatcgcagacctgatggtgggcgcaaaggaccaggcggtgttcaaatgtgaggtctcagatgagaatgttcggggtgtgtggctgaagaatgggaaggagctggtgcccgacagccgcataaaggtgtcccacatcgggcgggtccacaaactgaccattgacgacgtcacacctgccgacgaggctgactacagctttgtgcccgagggcttcgcctgcaacctgtcagccaagctccacttcatggaggtcaagattgacttcgtacccaggcaggaacctcccaagatccacctggactgcccaggccgcataccagacaccattgtggttgtagctggaaataagctacgtctggacgtccctatctctggggaccctgctcccactgtgatctggcagaaggctatcacgcaggggaataaggccccagccaggccagccccagatgccccagaggacacaggtgacagcgatgagtgggtgtttgacaagaagctgctgtgtgagaccgagggccgggtccgcgtggagaccaccaaggaccgcagcatcttcacggtcgagggggcagagaaggaagatgagggcgtctacacggtcacagtgaagaaccctgtgggcgaggaccaggtcaacctcacagtcaaggtcatcgacgtgccagacgcacctgcggcccccaagatcagcaacgtgggagaggactcctgcacagtacagtgggagccgcctgcctacgatggcgggcagcccatcctgggctacatcctggagcgcaagaagaagaagagctaccggtggatgcggctgaacttcgacctgattcaggagctgagtcatgaagcgcggcgcatgatcgagggcgtggtgtacgagatgcgcgtctacgcggtcaacgccatcggcatgtccaggcccagccctgcctcccagcccttcatgcctatcggtccccccagcgaacccacccacctggcagtagaggacgtctctgacaccacggtctccctcaagtggcggcccccagagcgcgtgggagcaggaggcctggatggctacagcgtggagtactgcccagagggctgctcagagtgggtggctgccctgcaggggctgacagagcacacatcgatactggtgaaggacctgcccacgggggcccggctgcttttccgagtgcgggcacacaatatggcagggcctggagcccctgttaccaccacggagccggtgacagtgcaggagatcctgcaacggccacggcttcagctgcccaggcacctgcgccagaccattcagaagaaggtcggggagcctgtgaaccttctcatccctttccagggcaagccccggcctcaggtgacctggaccaaagaggggcagcccctggcaggcgaggaggtgagcatccgcaacagccccacagacaccatcctgttcatccgggccgctcgccgcgtgcattcaggcacttaccaggtgacggtgcgcattgagaacatggaggacaaggccacgctggtgctgcaggttgttgacaagccaagtcctccccaggatctccgggtgactgacgcctggggtcttaatgtggctctggagtggaagccaccccaggatgtcggcaacacggagctctgggggtacacagtgcagaaagccgacaagaagaccatggagtggttcaccgtcttggagcattaccgccgcacccactgcgtggtgccagagctcatcattggcaatggctactacttccgcgtcttcagccagaatatggttggctttagtgacagagcggccaccaccaaggagcccgtctttatccccagaccaggcatcacctatgagccacccaactataaggccctggacttctccgaggccccaagcttcacccagcccctggtgaaccgctcggtcatcgcgggctacactgctatgctctgctgtgctgtccggggtagccccaagcccaagatttcctggttcaagaatggcctggacctgggagaagacgcccgcttccgcatgttcagcaagcagggagtgttgactctggagattagaaagccctgcccctttgacgggggcatctatgtctgcagggccaccaacttacagggcgaggcacggtgtgagtgccgcctggaggtgcgagtgcctcagtgacctcgagctgtgccttctagttgccagccatctgttgtttgcccctcccccgtgccttccttgaccctggaaggtgccactcccactgtcctttcctaataaaatgaggaaattgcatcgcattgtctgagtaggtgtcattctattctggggggtggggtggggcaggacagcaagggggaggattgggaagacaatagcaggcatgctggggatgcggtgggctctatggaccggtgcggccgcaggaacccctagtgatggagttggccactccctctctgcgcgctcgctcgctcactgaggccgggcgaccaaaggtcgcccgacgcccgggctttgcccgggcggcctcagtgagcgagcgagcgcgcagagagggagtggccaa

SEQ ID NO: 5 - DNA, 5076 bp, synthetic construct
  source 1..5076: mol_type = other DNA
ctgcgcgctcgctcgctcactgaggccgcccgggcaaagcccgggcgtcgggcgacctttggtcgcccggcctcagtgagcgagcgagcgcgcagagagggagtggccaactccatcactaggggttcctgcggccgcacgcgtctggaagatgtctttacccccagcatcagttcaagtggagcagcacataactcttgccctctgccttccaagattctggtgctgagacttatggagtgtcttggaggttgccttctgccccccaaccctgctcccagctggccctcccaggcctgggttgctggcctctgctttatcaggattctcaagagggacagctggtttatgttgcatgactgttccctgcatatctgctctggttttaaatagcttatctgagcagctggaggaccacatgggcttatatggcgtggggtacatgttcctgtagccttgtccctggcacctgccaaaatagcagccaacaccccccacccccaccgccatccccctgccccacccgtcccctgtcgcacattcctccctccgcagggctggctcaccaggccccagcccacatgcctgcttaaagccctctccatcctctgcctcacccagtccccgctgagactgagcagacgcctccaggatctgtcggcagctgctgttctgaggtaagtactagcagctacaatccagctaccattctgcttttattttatggttgggataaggctggattattctgagtccaagctaggcccttttgctaatcatgttcatacctcttatcttcctcccacagctcctgggcaacgtgctggtctgtgtgctggcccatcactttggcaaagaattgcgatcgccaccatgcctgagccggggaagtaagccagtctcagctttagcaagaagccacggtcagtggaagtggccgcaggcagccctgccgtgttcgaggccgagacagagcgggcaggagtgaaggtgcgctggcagcgcggaggcagtgacatcagcgccagcaacaagtacggcctggccacagagggcacacggcatacgctgacagtgcgggaagtgggccctgccgaccagggatcttacgcagtcattgctggctcctccaaggtcaagttcgacctcaaggtcatagaggcagagaaggcagagcccatgctggcccctgcccctgcccctgctgaggccactggagcccctggagaagccccggccccagccgctgagctgggagaaagtgccccaagtcccaaagggtcaagctcagcagctctcaatggtcctacccctggagcccccgatgaccccattggcctcttcgtgatgcggccacaggatggcgaggtgaccgtgggtggcagcatcaccttctcagcccgcgtggccggcgccagcctcctgaagccgcctgtggtcaagtggttcaagggcaaatgggtggacctgagcagcaaggtgggccagcacctgcagctgcacgacagctacgaccgcgccagcaaggtctatctgttcgagctgcacatcaccgatgcccagcctgccttcactggcagctaccgctgtgaggtgtccaccaaggacaaatttgactgctccaacttcaatctcactgtccacgaggccatgggcaccggagacctggacctcctatcagccttccgccgcacgagcctggctggaggtggtcggcggatcagtgatagccatgaggacactgggattctggacttcagctcactgctgaaaaagagagacagtttccggaccccgagggactcgaagctggaggcaccagcagaggaggacgtgtgggagatcctacggcaggcacccccatctgagtacgagcgcatcgccttccagtacggcgtcactgacctgcgcggcatgctaaagaggctcaagggcatgaggcgcgatgagaagaagagcacagcctttcagaagaagctggagccggcctaccaggtgagcaaaggccacaagatccggctgaccgtggaactggctgaccatgacgctgaggtcaaatggctcaagaatggccaggagatccagatgagcggcagcaagtacatctttgagtccatcggtgccaagcgtaccctgaccatcagccagtgctcattggcggacgacgcagcctaccagtgcgtggtgggtggcgagaagtgtagcacggagctctttgtgaaagagccccctgtgctcatcacgcgccccttggaggaccagctggtgatggtggggcagcgggtggagtttgagtgtgaagtatcggaggagggggcgcaagtcaaatggctgaaggacggggtggagctgacccgggaggagaccttcaaataccggttcaagaaggacgggcagagacaccacctgatcatcaacgaggccatgctggaggacgcggggcactatgcactgtgcactagcgggggccaggcgctggctgagctcattgtgcaggaaaagaagctggaggtgtaccagagcatcgcagacctgatggtgggcgcaaaggaccaggcggtgttcaaatgtgaggtctcagatgagaatgttcggggtgtgtggctgaagaatgggaaggagctggtgcccgacagccgcataaaggtgtcccacatcgggcgggtccacaaactgaccattgacgacgtcacacctgccgacgaggctgactacagctttgtgcccgagggcttcgcctgcaacctgtcagccaagctccacttcatggaggtcaagattgacttcgtacccaggcaggaacctcccaagatccacctggactgcccaggccgcataccagacaccattgtggttgtagctggaaataagctacgtctggacgtccctatctctggggaccctgctcccactgtgatctggcagaaggctatcacgcaggggaataaggccccagccaggccagccccagatgccccagaggacacaggtgacagcgatgagtgggtgtttgacaagaagctgctgtgtgagaccgagggccgggtccgcgtggagaccaccaaggaccgcagcatcttcacggtcgagggggcagagaaggaagatgagggcgtctacacggtcacagtgaagaaccctgtgggcgaggaccaggtcaacctcacagtcaaggtcatcgacgtgccagacgcacctgcggcccccaagatcagcaacgtgggagaggactcctgcacagtacagtgggagccgcctgcctacgatggcgggcagcccatcctgggctacatcctggagcgcaagaagaagaagagctaccggtggatgcggctgaacttcgacctgattcaggagctgagtcatgaagcgcggcgcatgatcgagggcgtggtgtacgagatgcgcgtctacgcggtcaacgccatcggcatgtccaggcccagccctgcctcccagcccttcatgcctatcggtccccccagcgaacccacccacctggcagtagaggacgtctctgacaccacggtctccctcaagtggcggcccccagagcgcgtgggagcaggaggcctggatggctacagcgtggagtactgcccagagggctgctcagagtgggtggctgccctgcaggggctgacagagcacacatcgatactggtgaaggacctgcccacgggggcccggctgcttttccgagtgcgggcacacaatatggcagggcctggagcccctgttaccaccacggagccggtgacagtgcaggagatcctgcaacggccacggcttcagctgcccaggcacctgcgccagaccattcagaagaaggtcggggagcctgtgaaccttctcatccctttccagggcaagccccggcctcaggtgacctggaccaaagaggggcagcccctggcaggcgaggaggtgagcatccgcaacagccccacagacaccatcctgttcatccgggccgctcgccgcgtgcattcaggcacttaccaggtgacggtgcgcattgagaacatggaggacaaggccacgctggtgctgcaggttgttgacaagccaagtcctccccaggatctccgggtgactgacgcctggggtcttaatgtggctctggagtggaagccaccccaggatgtcggcaacacggagctctgggggtacacagtgcagaaagccgacaagaagaccatggagtggttcaccgtcttggagcattaccgccgcacccactgcgtggtgccagagctcatcattggcaatggctactacttccgcgtcttcagccagaatatggttggctttagtgacagagcggccaccaccaaggagcccgtctttatccccagaccaggcatcacctatgagccacccaactataaggccctggacttctccgaggccccaagcttcacccagcccctggtgaaccgctcggtcatcgcgggctacactgctatgctctgctgtgctgtccggggtagccccaagcccaagatttcctggttcaagaatggcctggacctgggagaagacgcccgcttccgcatgttcagcaagcagggagtgttgactctggagattagaaagccctgcccctttgacgggggcatctatgtctgcagggccaccaacttacagggcgaggcacggtgtgagtgccgcctggaggtgcgagtgcctcagtgacctcgagctgtgccttctagttgccagccatctgttgtttgcccctcccccgtgccttccttgaccctggaaggtgccactcccactgtcctttcctaataaaatgaggaaattgcatcgcattgtctgagtaggtgtcattctattctggggggtggggtggggcaggacagcaagggggaggattgggaagacaatagcaggcatgctggggatgcggtgggctctatggaccggtgcggccgcaggaacccctagtgatggagttggccactccctctctgcgcgctcgctcgctcactgaggccgggcgaccaaaggtcgcccgacgcccgggctttgcccgggcggcctcagtgagcgagcgagcgcgcagkd

SEQ ID NO: 6 - DNA, 4663 bp, synthetic construct
  source 1..4663: mol_type = other DNA
ccttccaagattctggtgctgagacttatggagtgtcttggaggttgccttctgccccccaaccctgctcccagctggccctcccaggcctgggttgctggcctctgctttatcaggattctcaagagggacagctggtttatgttgcatgactgttccctgcatatctgctctggttttaaatagcttatctgagcagctggaggaccacatgggcttatatggcgtggggtacatgttcctgtagccttgtccctggcacctgccaaaatagcagccaacaccccccacccccaccgccatccccctgccccacccgtcccctgtcgcacattcctccctccgcagggctggctcaccaggccccagcccacatgcctgcttaaagccctctccatcctctgcctcacccagtccccgctgagactgagcagacgcctccaggatctgtcggcagctgctgttctgagccaccatgcctgagccggggaagaagccagtctcagcttttagcaagaagccacggtcagtggaagtggccgcaggcagccctgccgtgttcgaggccgagacagagcgggcaggagtgaaggtgcgctggcagcgcggaggcagtgacatcagcgccagcaacaagtacggcctggccacagagggcacacggcatacgctgacagtgcgggaagtgggccctgccgaccagggatcttacgcagtcattgctggctcctccaaggtcaagttcgacctcaaggtcatagaggcaggtaagtactagcagctacaatccagctaccattctgcttttattttatggttgggataaggctggattattctgagtccaagctaggcccttttgctaatcatgttcatacctcttatcttcctcccacagagaaggcagagcccatgctggcccctgcccctgcccctgctgaggccactggagcccctggagaagccccggccccagccgctgagctgggagaaagtgccccaagtcccaaagggtcaagctcagcagctctcaatggtcctacccctggagcccccgatgaccccattggcctcttcgtgatgcggccacaggatggcgaggtgaccgtgggtggcagcatcaccttctcagcccgcgtggccggcgccagcctcctgaagccgcctgtggtcaagtggttcaagggcaaatgggtggacctgagcagcaaggtgggccagcacctgcagctgcacgacagctacgaccgcgccagcaaggtctatctgttcgagctgcacatcaccgatgcccagcctgccttcactggcagctaccgctgtgaggtgtccaccaaggacaaatttgactgctccaacttcaatctcactgtccacgaggccatgggcaccggagacctggacctcctatcagccttccgccgcacgagcctggctggaggtggtcggcggatcagtgatagccatgaggacactgggattctggacttcagctcactgctgaaaaagagagacagtttccggaccccgagggactcgaagctggaggcaccagcagaggaggacgtgtgggagatcctacggcaggcacccccatctgagtacgagcgcatcgccttccagtacggcgtcactgacctgcgcggcatgctaaagaggctcaagggcatgaggcgcgatgagaagaagagcacagcctttcagaagaagctggagccggcctaccaggtgagcaaaggccacaagatccggctgaccgtggaactggctgaccatgacgctgaggtcaaatggctcaagaatggccaggagatccagatgagcggcagcaagtacatctttgagtccatcggtgccaagcgtaccctgaccatcagccagtgctcattggcggacgacgcagcctaccagtgcgtggtgggtggcgagaagtgtagcacggagctctttgtgaaagagccccctgtgctcatcacgcgccccttggaggaccagctggtgatggtggggcagcgggtggagtttgagtgtgaagtatcggaggagggggcgcaagtcaaatggctgaaggacggggtggagctgacccgggaggagaccttcaaataccggttcaagaaggacgggcagagacaccacctgatcatcaacgaggccatgctggaggacgcggggcactatgcactgtgcactagcgggggccaggcgctggctgagctcattgtgcaggaaaagaagctggaggtgtaccagagcatcgcagacctgatggtgggcgcaaaggaccaggcggtgttcaaatgtgaggtctcagatgagaatgttcggggtgtgtggctgaagaatgggaaggagctggtgcccgacagccgcataaaggtgtcccacatcgggcgggtccacaaactgaccattgacgacgtcacacctgccgacgaggctgactacagctttgtgcccgagggcttcgcctgcaacctgtcagccaagctccacttcatggaggtcaagattgacttcgtacccaggcaggaacctcccaagatccacctggactgcccaggccgcataccagacaccattgtggttgtagctggaaataagctacgtctggacgtccctatctctggggaccctgctcccactgtgatctggcagaaggctatcacgcaggggaataaggccccagccaggccagccccagatgccccagaggacacaggtgacagcgatgagtgggtgtttgacaagaagctgctgtgtgagaccgagggccgggtccgcgtggagaccaccaaggaccgcagcatcttcacggtcgagggggcagagaaggaagatgagggcgtctacacggtcacagtgaagaaccctgtgggcgaggaccaggtcaacctcacagtcaaggtcatcgacgtgccagacgcacctgcggcccccaagatcagcaacgtgggagaggactcctgcacagtacagtgggagccgcctgcctacgatggcgggcagcccatcctgggctacatcctggagcgcaagaagaagaagagctaccggtggatgcggctgaacttcgacctgattcaggagctgagtcatgaagcgcggcgcatgatcgagggcgtggtgtacgagatgcgcgtctacgcggtcaacgccatcggcatgtccaggcccagccctgcctcccagcccttcatgcctatcggtccccccagcgaacccacccacctggcagtagaggacgtctctgacaccacggtctccctcaagtggcggcccccagagcgcgtgggagcaggaggcctggatggctacagcgtggagtactgcccagagggctgctcagagtgggtggctgccctgcaggggctgacagagcacacatcgatactggtgaaggacctgcccacgggggcccggctgcttttccgagtgcgggcacacaatatggcagggcctggagcccctgttaccaccacggagccggtgacagtgcaggagatcctgcaacggccacggcttcagctgcccaggcacctgcgccagaccattcagaagaaggtcggggagcctgtgaaccttctcatccctttccagggcaagccccggcctcaggtgacctggaccaaagaggggcagcccctggcaggcgaggaggtgagcatccgcaacagccccacagacaccatcctgttcatccgggccgctcgccgcgtgcattcaggcacttaccaggtgacggtgcgcattgagaacatggaggacaaggccacgctggtgctgcaggttgttgacaagccaagtcctccccaggatctccgggtgactgacgcctggggtcttaatgtggctctggagtggaagccaccccaggatgtcggcaacacggagctctgggggtacacagtgcagaaagccgacaagaagaccatggagtggttcaccgtcttggagcattaccgccgcacccactgcgtggtgccagagctcatcattggcaatggctactacttccgcgtcttcagccagaatatggttggctttagtgacagagcggccaccaccaaggagcccgtctttatccccagaccaggcatcacctatgagccacccaactataaggccctggacttctccgaggccccaagcttcacccagcccctggtgaaccgctcggtcatcgcgggctacactgctatgctctgctgtgctgtccggggtagccccaagcccaagatttcctggttcaagaatggcctggacctgggagaagacgcccgcttccgcatgttcagcaagcagggagtgttgactctggagattagaaagccctgcccctttgacgggggcatctatgtctgcagggccaccaacttacagggcgaggcacggtgtgagtgccgcctggaggtgcgagtgcctcagtgacctcgagctgtgccttctagttgccagccatctgttgtttgcccctcccccgtgccttccttgaccctggaaggtgccactcccactgtcctttcctaataaaatgaggaaattgcatcgcattgtctgagtaggtgtcattctattctggggggtggggtggggcaggacagcaagggggaggattgggaagacaatagcaggcatgctggggatgcggtgggctctatgg

SEQ ID NO: 7 - DNA, 4969 bp, synthetic construct
  source 1..4969: mol_type = other DNA
ttggccactccctctctgcgcgctcgctcgctcactgaggccgcccgggcaaagcccgggcgtcgggcgacctttggtcgcccggcctcagtgagcgagcgagcgcgcagagagggagtggccaactccatcactaggggttcctgcggccgcccttccaagattctggtgctgagacttatggagtgtcttggaggttgccttctgccccccaaccctgctcccagctggccctcccaggcctgggttgctggcctctgctttatcaggattctcaagagggacagctggtttatgttgcatgactgttccctgcatatctgctctggttttaaatagcttatctgagcagctggaggaccacatgggcttatatggcgtggggtacatgttcctgtagccttgtccctggcacctgccaaaatagcagccaacaccccccacccccaccgccatccccctgccccacccgtcccctgtcgcacattcctccctccgcagggctggctcaccaggccccagcccacatgcctgcttaaagccctctccatcctctgcctcacccagtccccgctgagactgagcagacgcctccaggatctgtcggcagctgctgttctgagccaccatgcctgagccggggaagaagccagtctcagcttttagcaagaagccacggtcagtggaagtggccgcaggcagccctgccgtgttcgaggccgagacagagcgggcaggagtgaaggtgcgctggcagcgcggaggcagtgacatcagcgccagcaacaagtacggcctggccacagagggcacacggcatacgctgacagtgcgggaagtgggccctgccgaccagggatcttacgcagtcattgctggctcctccaaggtcaagttcgacctcaaggtcatagaggcaggtaagtactagcagctacaatccagctaccattctgcttttattttatggttgggataaggctggattattctgagtccaagctaggcccttttgctaatcatgttcatacctcttatcttcctcccacagagaaggcagagcccatgctggcccctgcccctgcccctgctgaggccactggagcccctggagaagccccggccccagccgctgagctgggagaaagtgccccaagtcccaaagggtcaagctcagcagctctcaatggtcctacccctggagcccccgatgaccccattggcctcttcgtgatgcggccacaggatggcgaggtgaccgtgggtggcagcatcaccttctcagcccgcgtggccggcgccagcctcctgaagccgcctgtggtcaagtggttcaagggcaaatgggtggacctgagcagcaaggtgggccagcacctgcagctgcacgacagctacgaccgcgccagcaaggtctatctgttcgagctgcacatcaccgatgcccagcctgccttcactggcagctaccgctgtgaggtgtccaccaaggacaaatttgactgctccaacttcaatctcactgtccacgaggccatgggcaccggagacctggacctcctatcagccttccgccgcacgagcctggctggaggtggtcggcggatcagtgatagccatgaggacactgggattctggacttcagctcactgctgaaaaagagagacagtttccggaccccgagggactcgaagctggaggcaccagcagaggaggacgtgtgggagatcctacggcaggcacccccatctgagtacgagcgcatcgccttccagtacggcgtcactgacctgcgcggcatgctaaagaggctcaagggcatgaggcgcgatgagaagaagagcacagcctttcagaagaagctggagccggcctaccaggtgagcaaaggccacaagatccggctgaccgtggaactggctgaccatgacgctgaggtcaaatggctcaagaatggccaggagatccagatgagcggcagcaagtacatctttgagtccatcggtgccaagcgtaccctgaccatcagccagtgctcattggcggacgacgcagcctaccagtgcgtggtgggtggcgagaagtgtagcacggagctctttgtgaaagagccccctgtgctcatcacgcgccccttggaggaccagctggtgatggtggggcagcgggtggagtttgagtgtgaagtatcggaggagggggcgcaagtcaaatggctgaaggacggggtggagctgacccgggaggagaccttcaaataccggttcaagaaggacgggcagagacaccacctgatcatcaacgaggccatgctggaggacgcggggcactatgcactgtgcactagcgggggccaggcgctggctgagctcattgtgcaggaaaagaagctggaggtgtaccagagcatcgcagacctgatggtgggcgcaaaggaccaggcggtgttcaaatgtgaggtctcagatgagaatgttcggggtgtgtggctgaagaatgggaaggagctggtgcccgacagccgcataaaggtgtcccacatcgggcgggtccacaaactgaccattgacgacgtcacacctgccgacgaggctgactacagctttgtgcccgagggcttcgcctgcaacctgtcagccaagctccacttcatggaggtcaagattgacttcgtacccaggcaggaacctcccaagatccacctggactgcccaggccgcataccagacaccattgtggttgtagctggaaataagctacgtctggacgtccctatctctggggaccctgctcccactgtgatctggcagaaggctatcacgcaggggaataaggccccagccaggccagccccagatgccccagaggacacaggtgacagcgatgagtgggtgtttgacaagaagctgctgtgtgagaccgagggccgggtccgcgtggagaccaccaaggaccgcagcatcttcacggtcgagggggcagagaaggaagatgagggcgtctacacggtcacagtgaagaaccctgtgggcgaggaccaggtcaacctcacagtcaaggtcatcgacgtgccagacgcacctgcggcccccaagatcagcaacgtgggagaggactcctgcacagtacagtgggagccgcctgcctacgatggcgggcagcccatcctgggctacatcctggagcgcaagaagaagaagagctaccggtggatgcggctgaacttcgacctgattcaggagctgagtcatgaagcgcggcgcatgatcgagggcgtggtgtacgagatgcgcgtctacgcggtcaacgccatcggcatgtccaggcccagccctgcctcccagcccttcatgcctatcggtccccccagcgaacccacccacctggcagtagaggacgtctctgacaccacggtctccctcaagtggcggcccccagagcgcgtgggagcaggaggcctggatggctacagcgtggagtactgcccagagggctgctcagagtgggtggctgccctgcaggggctgacagagcacacatcgatactggtgaaggacctgcccacgggggcccggctgcttttccgagtgcgggcacacaatatggcagggcctggagcccctgttaccaccacggagccggtgacagtgcaggagatcctgcaacggccacggcttcagctgcccaggcacctgcgccagaccattcagaagaaggtcggggagcctgtgaaccttctcatccctttccagggcaagccccggcctcaggtgacctggaccaaagaggggcagcccctggcaggcgaggaggtgagcatccgcaacagccccacagacaccatcctgttcatccgggccgctcgccgcgtgcattcaggcacttaccaggtgacggtgcgcattgagaacatggaggacaaggccacgctggtgctgcaggttgttgacaagccaagtcctccccaggatctccgggtgactgacgcctggggtcttaatgtggctctggagtggaagccaccccaggatgtcggcaacacggagctctgggggtacacagtgcagaaagccgacaagaagaccatggagtggttcaccgtcttggagcattaccgccgcacccactgcgtggtgccagagctcatcattggcaatggctactacttccgcgtcttcagccagaatatggttggctttagtgacagagcggccaccaccaaggagcccgtctttatccccagaccaggcatcacctatgagccacccaactataaggccctggacttctccgaggccccaagcttcacccagcccctggtgaaccgctcggtcatcgcgggctacactgctatgctctgctgtgctgtccggggtagccccaagcccaagatttcctggttcaagaatggcctggacctgggagaagacgcccgcttccgcatgttcagcaagcagggagtgttgactctggagattagaaagccctgcccctttgacgggggcatctatgtctgcagggccaccaacttacagggcgaggcacggtgtgagtgccgcctggaggtgcgagtgcctcagtgacctcgagctgtgccttctagttgccagccatctgttgtttgcccctcccccgtgccttccttgaccctggaaggtgccactcccactgtcctttcctaataaaatgaggaaattgcatcgcattgtctgagtaggtgtcattctattctggggggtggggtggggcaggacagcaagggggaggattgggaagacaatagcaggcatgctggggatgcggtgggctctatgggcggccgcaggaacccctagtgatggagttggccactccctctctgcgcgctcgctcgctcactgaggccgggcgaccaaaggtcgcccgacgcccgggctttgcccgggcggcctcagtgagcgagcgagcgcgcagagagggagtggccaa

SEQ ID NO: 8 - DNA, 4939 bp, synthetic construct
  source 1..4939: mol_type = other DNA
ctgcgcgctcgctcgctcactgaggccgcccgggcaaagcccgggcgtcgggcgacctttggtcgcccggcctcagtgagcgagcgagcgcgcagagagggagtggccaactccatcactaggggttcctgcggccgcccttccaagattctggtgctgagacttatggagtgtcttggaggttgccttctgccccccaaccctgctcccagctggccctcccaggcctgggttgctggcctctgctttatcaggattctcaagagggacagctggtttatgttgcatgactgttccctgcatatctgctctggttttaaatagcttatctgagcagctggaggaccacatgggcttatatggcgtggggtacatgttcctgtagccttgtccctggcacctgccaaaatagcagccaacaccccccacccccaccgccatccccctgccccacccgtcccctgtcgcacattcctccctccgcagggctggctcaccaggccccagcccacatgcctgcttaaagccctctccatcctctgcctcacccagtccccgctgagactgagcagacgcctccaggatctgtcggcagctgctgttctgagccaccatgcctgagccggggaagaagccagtctcagcttttagcaagaagccacggtcagtggaagtggccgcaggcagccctgccgtgttcgaggccgagacagagcgggcaggagtgaaggtgcgctggcagcgcggaggcagtgacatcagcgccagcaacaagtacggcctggccacagagggcacacggcatacgctgacagtgcgggaagtgggccctgccgaccagggatcttacgcagtcattgctggctcctccaaggtcaagttcgacctcaaggtcatagaggcaggtaagtactagcagctacaatccagctaccattctgcttttattttatggttgggataaggctggattattctgagtccaagctaggcccttttgctaatcatgttcatacctcttatcttcctcccacagagaaggcagagcccatgctggcccctgcccctgcccctgctgaggccactggagcccctggagaagccccggccccagccgctgagctgggagaaagtgccccaagtcccaaagggtcaagctcagcagctctcaatggtcctacccctggagcccccgatgaccccattggcctcttcgtgatgcggccacaggatggcgaggtgaccgtgggtggcagcatcaccttctcagcccgcgtggccggcgccagcctcctgaagccgcctgtggtcaagtggttcaagggcaaatgggtggacctgagcagcaaggtgggccagcacctgcagctgcacgacagctacgaccgcgccagcaaggtctatctgttcgagctgcacatcaccgatgcccagcctgccttcactggcagctaccgctgtgaggtgtccaccaaggacaaatttgactgctccaacttcaatctcactgtccacgaggccatgggcaccggagacctggacctcctatcagccttccgccgcacgagcctggctggaggtggtcggcggatcagtgatagccatgaggacactgggattctggacttcagctcactgctgaaaaagagagacagtttccggaccccgagggactcgaagctggaggcaccagcagaggaggacgtgtgggagatcctacggcaggcacccccatctgagtacgagcgcatcgccttccagtacggcgtcactgacctgcgcggcatgctaaagaggctcaagggcatgaggcgcgatgagaagaagagcacagcctttcagaagaagctggagccggcctaccaggtgagcaaaggccacaagatccggctgaccgtggaactggctgaccatgacgctgaggtcaaatggctcaagaatggccaggagatccagatgagcggcagcaagtacatctttgagtccatcggtgccaagcgtaccctgaccatcagccagtgctcattggcggacgacgcagcctaccagtgcgtggtgggtggcgagaagtgtagcacggagctctttgtgaaagagccccctgtgctcatcacgcgccccttggaggaccagctggtgatggtggggcagcgggtggagtttgagtgtgaagtatcggaggagggggcgcaagtcaaatggctgaaggacggggtggagctgacccgggaggagaccttcaaataccggttcaagaaggacgggcagagacaccacctgatcatcaacgaggccatgctggaggacgcggggcactatgcactgtgcactagcgggggccaggcgctggctgagctcattgtgcaggaaaagaagctggaggtgtaccagagcatcgcagacctgatggtgggcgcaaaggaccaggcggtgttcaaatgtgaggtctcagatgagaatgttcggggtgtgtggctgaagaatgggaaggagctggtgcccgacagccgcataaaggtgtcccacatcgggcgggtccacaaactgaccattgacgacgtcacacctgccgacgaggctgactacagctttgtgcccgagggcttcgcctgcaacctgtcagccaagctccacttcatggaggtcaagattgacttcgtacccaggcaggaacctcccaagatccacctggactgcccaggccgcataccagacaccattgtggttgtagctggaaataagctacgtctggacgtccctatctctggggaccctgctcccactgtgatctggcagaaggctatcacgcaggggaataaggccccagccaggccagccccagatgccccagaggacacaggtgacagcgatgagtgggtgtttgacaagaagctgctgtgtgagaccgagggccgggtccgcgtggagaccaccaaggaccgcagcatcttcacggtcgagggggcagagaaggaagatgagggcgtctacacggtcacagtgaagaaccctgtgggcgaggaccaggtcaacctcacagtcaaggtcatcgacgtgccagacgcacctgcggcccccaagatcagcaacgtgggagaggactcctgcacagtacagtgggagccgcctgcctacgatggcgggcagcccatcctgggctacatcctggagcgcaagaagaagaagagctaccggtggatgcggctgaacttcgacctgattcaggagctgagtcatgaagcgcggcgcatgatcgagggcgtggtgtacgagatgcgcgtctacgcggtcaacgccatcggcatgtccaggcccagccctgcctcccagcccttcatgcctatcggtccccccagcgaacccacccacctggcagtagaggacgtctctgacaccacggtctccctcaagtggcggcccccagagcgcgtgggagcaggaggcctggatggctacagcgtggagtactgcccagagggctgctcagagtgggtggctgccctgcaggggctgacagagcacacatcgatactggtgaaggacctgcccacgggggcccggctgcttttccgagtgcgggcacacaatatggcagggcctggagcccctgttaccaccacggagccggtgacagtgcaggagatcctgcaacggccacggcttcagctgcccaggcacctgcgccagaccattcagaagaaggtcggggagcctgtgaaccttctcatccctttccagggcaagccccggcctcaggtgacctggaccaaagaggggcagcccctggcaggcgaggaggtgagcatccgcaacagccccacagacaccatcctgttcatccgggccgctcgccgcgtgcattcaggcacttaccaggtgacggtgcgcattgagaacatggaggacaaggccacgctggtgctgcaggttgttgacaagccaagtcctccccaggatctccgggtgactgacgcctggggtcttaatgtggctctggagtggaagccaccccaggatgtcggcaacacggagctctgggggtacacagtgcagaaagccgacaagaagaccatggagtggttcaccgtcttggagcattaccgccgcacccactgcgtggtgccagagctcatcattggcaatggctactacttccgcgtcttcagccagaatatggttggctttagtgacagagcggccaccaccaaggagcccgtctttatccccagaccaggcatcacctatgagccacccaactataaggccctggacttctccgaggccccaagcttcacccagcccctggtgaaccgctcggtcatcgcgggctacactgctatgctctgctgtgctgtccggggtagccccaagcccaagatttcctggttcaagaatggcctggacctgggagaagacgcccgcttccgcatgttcagcaagcagggagtgttgactctggagattagaaagccctgcccctttgacgggggcatctatgtctgcagggccaccaacttacagggcgaggcacggtgtgagtgccgcctggaggtgcgagtgcctcagtgacctcgagctgtgccttctagttgccagccatctgttgtttgcccctcccccgtgccttccttgaccctggaaggtgccactcccactgtcctttcctaataaaatgaggaaattgcatcgcattgtctgagtaggtgtcattctattctggggggtggggtggggcaggacagcaagggggaggattgggaagacaatagcaggcatgctggggatgcggtgggctctatgggcggccgcaggaacccctagtgatggagttggccactccctctctgcgcgctcgctcgctcactgaggccgggcgaccaaaggtcgcccgacgcccgggctttgcccgggcggcctcagtgagcgagcgagcgcgcag

SEQ ID NO: 9 - DNA, 4663 bp, synthetic construct
  source 1..4663: mol_type = other DNA
ctggaagatgtctttacccccagcatcagttcaagtggagcagcacataactcttgccctctgccttccaagattctggtgctgagacttatggagtgtcttggaggttgccttctgccccccaaccctgctcccagctggccctcccaggcctgggttgctggcctctgctttatcaggattctcaagagggacagctggtttatgttgcatgactgttccctgcatatctgctctggttttaaatagcttatctgagcagctggaggaccacatgggcttatatggcgtggggtacatgttcctgtagccttgtccctggcacctgccaaaatagcagccaacaccccccacccccaccgccatccccctgccccacccgtcccctgtcgcacattcctccctccgcagggctggctcaccaggccccagcccacatgcctgcttaaagccctctccatcctctgcctcacccagtccccgctgagactgagcagacgcctccaggatctgtcggcagctgctgttctgagccaccatgcctgagccggggaagaagccagtctcagcttttagcaagaagccacggtcagtggaagtggccgcaggcagccctgccgtgttcgaggccgagacagagcgggcaggagtgaaggtgcgctggcagcgcggaggcagtgacatcagcgccagcaacaagtacggcctggccacagagggcacacggcatacgctgacagtgcgggaagtgggccctgccgaccagggatcttacgcagtcattgctggctcctccaaggtcaagttcgacctcaaggtcatagaggcaggtaagtactagcagctacaatccagctaccattctgcttttattttatggttgggataaggctggattattctgagtccaagctaggcccttttgctaatcatgttcatacctcttatcttcctcccacagagaaggcagagcccatgctggcccctgcccctgcccctgctgaggccactggagcccctggagaagccccggccccagccgctgagctgggagaaagtgccccaagtcccaaagggtcaagctcagcagctctcaatggtcctacccctggagcccccgatgaccccattggcctcttcgtgatgcggccacaggatggcgaggtgaccgtgggtggcagcatcaccttctcagcccgcgtggccggcgccagcctcctgaagccgcctgtggtcaagtggttcaagggcaaatgggtggacctgagcagcaaggtgggccagcacctgcagctgcacgacagctacgaccgcgccagcaaggtctatctgttcgagctgcacatcaccgatgcccagcctgccttcactggcagctaccgctgtgaggtgtccaccaaggacaaatttgactgctccaacttcaatctcactgtccacgaggccatgggcaccggagacctggacctcctatcagccttccgccgcacgagcctggctggaggtggtcggcggatcagtgatagccatgaggacactgggattctggacttcagctcactgctgaaaaagagagacagtttccggaccccgagggactcgaagctggaggcaccagcagaggaggacgtgtgggagatcctacggcaggcacccccatctgagtacgagcgcatcgccttccagtacggcgtcactgacctgcgcggcatgctaaagaggctcaagggcatgaggcgcgatgagaagaagagcacagcctttcagaagaagctggagccggcctaccaggtgagcaaaggccacaagatccggctgaccgtggaactggctgaccatgacgctgaggtcaaatggctcaagaatggccaggagatccagatgagcggcagcaagtacatctttgagtccatcggtgccaagcgtaccctgaccatcagccagtgctcattggcggacgacgcagcctaccagtgcgtggtgggtggcgagaagtgtagcacggagctctttgtgaaagagccccctgtgctcatcacgcgccccttggaggaccagctggtgatggtggggcagcgggtggagtttgagtgtgaagtatcggaggagggggcgcaagtcaaatggctgaaggacggggtggagctgacccgggaggagaccttcaaataccggttcaagaaggacgggcagagacaccacctgatcatcaacgaggccatgctggaggacgcggggcactatgcactgtgcactagcgggggccaggcgctggctgagctcattgtgcaggaaaagaagctggaggtgtaccagagcatcgcagacctgatggtgggcgcaaaggaccaggcggtgttcaaatgtgaggtctcagatgagaatgttcggggtgtgtggctgaagaatgggaaggagctggtgcccgacagccgcataaaggtgtcccacatcgggcgggtccacaaactgaccattgacgacgtcacacctgccgacgaggctgactacagctttgtgcccgagggcttcgcctgcaacctgtcagccaagctccacttcatggaggtcaagattgacttcgtacccaggcaggaacctcccaagatccacctggactgcccaggccgcataccagacaccattgtggttgtagctggaaataagctacgtctggacgtccctatctctggggaccctgctcccactgtgatctggcagaaggctatcacgcaggggaataaggccccagccaggccagccccagatgccccagaggacacaggtgacagcgatgagtgggtgtttgacaagaagctgctgtgtgagaccgagggccgggtccgcgtggagaccaccaaggaccgcagcatcttcacggtcgagggggcagagaaggaagatgagggcgtctacacggtcacagtgaagaaccctgtgggcgaggaccaggtcaacctcacagtcaaggtcatcgacgtgccagacgcacctgcggcccccaagatcagcaacgtgggagaggactcctgcacagtacagtgggagccgcctgcctacgatggcgggcagcccatcctgggctacatcctggagcgcaagaagaagaagagctaccggtggatgcggctgaacttcgacctgattcaggagctgagtcatgaagcgcggcgcatgatcgagggcgtggtgtacgagatgcgcgtctacgcggtcaacgccatcggcatgtccaggcccagccctgcctcccagcccttcatgcctatcggtccccccagcgaacccacccacctggcagtagaggacgtctctgacaccacggtctccctcaagtggcggcccccagagcgcgtgggagcaggaggcctggatggctacagcgtggagtactgcccagagggctgctcagagtgggtggctgccctgcaggggctgacagagcacacatcgatactggtgaaggacctgcccacgggggcccggctgcttttccgagtgcgggcacacaatatggcagggcctggagcccctgttaccaccacggagccggtgacagtgcaggagatcctgcaacggccacggcttcagctgcccaggcacctgcgccagaccattcagaagaaggtcggggagcctgtgaaccttctcatccctttccagggcaagccccggcctcaggtgacctggaccaaagaggggcagcccctggcaggcgaggaggtgagcatccgcaacagccccacagacaccatcctgttcatccgggccgctcgccgcgtgcattcaggcacttaccaggtgacggtgcgcattgagaacatggaggacaaggccacgctggtgctgcaggttgttgacaagccaagtcctccccaggatctccgggtgactgacgcctggggtcttaatgtggctctggagtggaagccaccccaggatgtcggcaacacggagctctgggggtacacagtgcagaaagccgacaagaagaccatggagtggttcaccgtcttggagcattaccgccgcacccactgcgtggtgccagagctcatcattggcaatggctactacttccgcgtcttcagccagaatatggttggctttagtgacagagcggccaccaccaaggagcccgtctttatccccagaccaggcatcacctatgagccacccaactataaggccctggacttctccgaggccccaagcttcacccagcccctggtgaaccgctcggtcatcgcgggctacactgctatgctctgctgtgctgtccggggtagccccaagcccaagatttcctggttcaagaatggcctggacctgggagaagacgcccgcttccgcatgttcagcaagcagggagtgttgactctggagattagaaagccctgcccctttgacgggggcatctatgtctgcagggccaccaacttacagggcgaggcacggtgtgagtgccgcctggaggtgcgagtgcctcagtgaaccctggaaggtgccactcccactgtcctttcctaataaaatgaggaaattgcatcgcattgtctgagtaggtgtcattctattctggggggtggggtggggcaggacagcaagggggaggattgggaagacaatagcaggcatgctggggatgcggtgggctctatgg

SEQ ID NO: 10 - DNA, 4969 bp, synthetic construct
  source 1..4969: mol_type = other DNA
ttggccactccctctctgcgcgctcgctcgctcactgaggccgcccgggcaaagcccgggcgtcgggcgacctttggtcgcccggcctcagtgagcgagcgagcgcgcagagagggagtggccaactccatcactaggggttcctgcggccgcctggaagatgtctttacccccagcatcagttcaagtggagcagcacataactcttgccctctgccttccaagattctggtgctgagacttatggagtgtcttggaggttgccttctgccccccaaccctgctcccagctggccctcccaggcctgggttgctggcctctgctttatcaggattctcaagagggacagctggtttatgttgcatgactgttccctgcatatctgctctggttttaaatagcttatctgagcagctggaggaccacatgggcttatatggcgtggggtacatgttcctgtagccttgtccctggcacctgccaaaatagcagccaacaccccccacccccaccgccatccccctgccccacccgtcccctgtcgcacattcctccctccgcagggctggctcaccaggccccagcccacatgcctgcttaaagccctctccatcctctgcctcacccagtccccgctgagactgagcagacgcctccaggatctgtcggcagctgctgttctgagccaccatgcctgagccggggaagaagccagtctcagcttttagcaagaagccacggtcagtggaagtggccgcaggcagccctgccgtgttcgaggccgagacagagcgggcaggagtgaaggtgcgctggcagcgcggaggcagtgacatcagcgccagcaacaagtacggcctggccacagagggcacacggcatacgctgacagtgcgggaagtgggccctgccgaccagggatcttacgcagtcattgctggctcctccaaggtcaagttcgacctcaaggtcatagaggcaggtaagtactagcagctacaatccagctaccattctgcttttattttatggttgggataaggctggattattctgagtccaagctaggcccttttgctaatcatgttcatacctcttatcttcctcccacagagaaggcagagcccatgctggcccctgcccctgcccctgctgaggccactggagcccctggagaagccccggccccagccgctgagctgggagaaagtgccccaagtcccaaagggtcaagctcagcagctctcaatggtcctacccctggagcccccgatgaccccattggcctcttcgtgatgcggccacaggatggcgaggtgaccgtgggtggcagcatcaccttctcagcccgcgtggccggcgccagcctcctgaagccgcctgtggtcaagtggttcaagggcaaatgggtggacctgagcagcaaggtgggccagcacctgcagctgcacgacagctacgaccgcgccagcaaggtctatctgttcgagctgcacatcaccgatgcccagcctgccttcactggcagctaccgctgtgaggtgtccaccaaggacaaatttgactgctccaacttcaatctcactgtccacgaggccatgggcaccggagacctggacctcctatcagccttccgccgcacgagcctggctggaggtggtcggcggatcagtgatagccatgaggacactgggattctggacttcagctcactgctgaaaaagagagacagtttccggaccccgagggactcgaagctggaggcaccagcagaggaggacgtgtgggagatcctacggcaggcacccccatctgagtacgagcgcatcgccttccagtacggcgtcactgacctgcgcggcatgctaaagaggctcaagggcatgaggcgcgatgagaagaagagcacagcctttcagaagaagctggagccggcctaccaggtgagcaaaggccacaagatccggctgaccgtggaactggctgaccatgacgctgaggtcaaatggctcaagaatggccaggagatccagatgagcggcagcaagtacatctttgagtccatcggtgccaagcgtaccctgaccatcagccagtgctcattggcggacgacgcagcctaccagtgcgtggtgggtggcgagaagtgtagcacggagctctttgtgaaagagccccctgtgctcatcacgcgccccttggaggaccagctggtgatggtggggcagcgggtggagtttgagtgtgaagtatcggaggagggggcgcaagtcaaatggctgaaggacggggtggagctgacccgggaggagaccttcaaataccggttcaagaaggacgggcagagacaccacctgatcatcaacgaggccatgctggaggacgcggggcactatgcactgtgcactagcgggggccaggcgctggctgagctcattgtgcaggaaaagaagctggaggtgtaccagagcatcgcagacctgatggtgggcgcaaaggaccaggcggtgttcaaatgtgaggtctcagatgagaatgttcggggtgtgtggctgaagaatgggaaggagctggtgcccgacagccgcataaaggtgtcccacatcgggcgggtccacaaactgaccattgacgacgtcacacctgccgacgaggctgactacagctttgtgcccgagggcttcgcctgcaacctgtcagccaagctccacttcatggaggtcaagattgacttcgtacccaggcaggaacctcccaagatccacctggactgcccaggccgcataccagacaccattgtggttgtagctggaaataagctacgtctggacgtccctatctctggggaccctgctcccactgtgatctggcagaaggctatcacgcaggggaataaggccccagccaggccagccccagatgccccagaggacacaggtgacagcgatgagtgggtgtttgacaagaagctgctgtgtgagaccgagggccgggtccgcgtggagaccaccaaggaccgcagcatcttcacggtcgagggggcagagaaggaagatgagggcgtctacacggtcacagtgaagaaccctgtgggcgaggaccaggtcaacctcacagtcaaggtcatcgacgtgccagacgcacctgcggcccccaagatcagcaacgtgggagaggactcctgcacagtacagtgggagccgcctgcctacgatggcgggcagcccatcctgggctacatcctggagcgcaagaagaagaagagctaccggtggatgcggctgaacttcgacctgattcaggagctgagtcatgaagcgcggcgcatgatcgagggcgtggtgtacgagatgcgcgtctacgcggtcaacgccatcggcatgtccaggcccagccctgcctcccagcccttcatgcctatcggtccccccagcgaacccacccacctggcagtagaggacgtctctgacaccacggtctccctcaagtggcggcccccagagcgcgtgggagcaggaggcctggatggctacagcgtggagtactgcccagagggctgctcagagtgggtggctgccctgcaggggctgacagagcacacatcgatactggtgaaggacctgcccacgggggcccggctgcttttccgagtgcgggcacacaatatggcagggcctggagcccctgttaccaccacggagccggtgacagtgcaggagatcctgcaacggccacggcttcagctgcccaggcacctgcgccagaccattcagaagaaggtcggggagcctgtgaaccttctcatccctttccagggcaagccccggcctcaggtgacctggaccaaagaggggcagcccctggcaggcgaggaggtgagcatccgcaacagccccacagacaccatcctgttcatccgggccgctcgccgcgtgcattcaggcacttaccaggtgacggtgcgcattgagaacatggaggacaaggccacgctggtgctgcaggttgttgacaagccaagtcctccccaggatctccgggtgactgacgcctggggtcttaatgtggctctggagtggaagccaccccaggatgtcggcaacacggagctctgggggtacacagtgcagaaagccgacaagaagaccatggagtggttcaccgtcttggagcattaccgccgcacccactgcgtggtgccagagctcatcattggcaatggctactacttccgcgtcttcagccagaatatggttggctttagtgacagagcggccaccaccaaggagcccgtctttatccccagaccaggcatcacctatgagccacccaactataaggccctggacttctccgaggccccaagcttcacccagcccctggtgaaccgctcggtcatcgcgggctacactgctatgctctgctgtgctgtccggggtagccccaagcccaagatttcctggttcaagaatggcctggacctgggagaagacgcccgcttccgcatgttcagcaagcagggagtgttgactctggagattagaaagccctgcccctttgacgggggcatctatgtctgcagggccaccaacttacagggcgaggcacggtgtgagtgccgcctggaggtgcgagtgcctcagtgaaccctggaaggtgccactcccactgtcctttcctaataaaatgaggaaattgcatcgcattgtctgagtaggtgtcattctattctggggggtggggtggggcaggacagcaagggggaggattgggaagacaatagcaggcatgctggggatgcggtgggctctatgggcggccgcaggaacccctagtgatggagttggccactccctctctgcgcgctcgctcgctcactgaggccgggcgaccaaaggtcgcccgacgcccgggctttgcccgggcggcctcagtgagcgagcgagcgcgcagagagggagtggccaa

SEQ ID NO: 11 - DNA, 4939 bp, synthetic construct
  source 1..4939: mol_type = other DNA
ctgcgcgctcgctcgctcactgaggccgcccgggcaaagcccgggcgtcgggcgacctttggtcgcccggcctcagtgagcgagcgagcgcgcagagagggagtggccaactccatcactaggggttcctgcggccgcctggaagatgtctttacccccagcatcagttcaagtggagcagcacataactcttgccctctgccttccaagattctggtgctgagacttatggagtgtcttggaggttgccttctgccccccaaccctgctcccagctggccctcccaggcctgggttgctggcctctgctttatcaggattctcaagagggacagctggtttatgttgcatgactgttccctgcatatctgctctggttttaaatagcttatctgagcagctggaggaccacatgggcttatatggcgtggggtacatgttcctgtagccttgtccctggcacctgccaaaatagcagccaacaccccccacccccaccgccatccccctgccccacccgtcccctgtcgcacattcctccctccgcagggctggctcaccaggccccagcccacatgcctgcttaaagccctctccatcctctgcctcacccagtccccgctgagactgagcagacgcctccaggatctgtcggcagctgctgttctgagccaccatgcctgagccggggaagaagccagtctcagcttttagcaagaagccacggtcagtggaagtggccgcaggcagccctgccgtgttcgaggccgagacagagcgggcaggagtgaaggtgcgctggcagcgcggaggcagtgacatcagcgccagcaacaagtacggcctggccacagagggcacacggcatacgctgacagtgcgggaagtgggccctgccgaccagggatcttacgcagtcattgctggctcctccaaggtcaagttcgacctcaaggtcatagaggcaggtaagtactagcagctacaatccagctaccattctgcttttattttatggttgggataaggctggattattctgagtccaagctaggcccttttgctaatcatgttcatacctcttatcttcctcccacagagaaggcagagcccatgctggcccctgcccctgcccctgctgaggccactggagcccctggagaagccccggccccagccgctgagctgggagaaagtgccccaagtcccaaagggtcaagctcagcagctctcaatggtcctacccctggagcccccgatgaccccattggcctcttcgtgatgcggccacaggatggcgaggtgaccgtgggtggcagcatcaccttctcagcccgcgtggccggcgccagcctcctgaagccgcctgtggtcaagtggttcaagggcaaatgggtggacctgagcagcaaggtgggccagcacctgcagctgcacgacagctacgaccgcgccagcaaggtctatctgttcgagctgcacatcaccgatgcccagcctgccttcactggcagctaccgctgtgaggtgtccaccaaggacaaatttgactgctccaacttcaatctcactgtccacgaggccatgggcaccggagacctggacctcctatcagccttccgccgcacgagcctggctggaggtggtcggcggatcagtgatagccatgaggacactgggattctggacttcagctcactgctgaaaaagagagacagtttccggaccccgagggactcgaagctggaggcaccagcagaggaggacgtgtgggagatcctacggcaggcacccccatctgagtacgagcgcatcgccttccagtacggcgtcactgacctgcgcggcatgctaaagaggctcaagggcatgaggcgcgatgagaagaagagcacagcctttcagaagaagctggagccggcctaccaggtgagcaaaggccacaagatccggctgaccgtggaactggctgaccatgacgctgaggtcaaatggctcaagaatggccaggagatccagatgagcggcagcaagtacatctttgagtccatcggtgccaagcgtaccctgaccatcagccagtgctcattggcggacgacgcagcctaccagtgcgtggtgggtggcgagaagtgtagcacggagctctttgtgaaagagccccctgtgctcatcacgcgccccttggaggaccagctggtgatggtggggcagcgggtggagtttgagtgtgaagtatcggaggagggggcgcaagtcaaatggctgaaggacggggtggagctgacccgggaggagaccttcaaataccggttcaagaaggacgggcagagacaccacctgatcatcaacgaggccatgctggaggacgcggggcactatgcactgtgcactagcgggggccaggcgctggctgagctcattgtgcaggaaaagaagctggaggtgtaccagagcatcgcagacctgatggtgggcgcaaaggaccaggcggtgttcaaatgtgaggtctcagatgagaatgttcggggtgtgtggctgaagaatgggaaggagctggtgcccgacagccgcataaaggtgtcccacatcgggcgggtccacaaactgaccattgacgacgtcacacctgccgacgaggctgactacagctttgtgcccgagggcttcgcctgcaacctgtcagccaagctccacttcatggaggtcaagattgacttcgtacccaggcaggaacctcccaagatccacctggactgcccaggccgcataccagacaccattgtggttgtagctggaaataagctacgtctggacgtccctatctctggggaccctgctcccactgtgatctggcagaaggctatcacgcaggggaataaggccccagccaggccagccccagatgccccagaggacacaggtgacagcgatgagtgggtgtttgacaagaagctgctgtgtgagaccgagggccgggtccgcgtggagaccaccaaggaccgcagcatcttcacggtcgagggggcagagaaggaagatgagggcgtctacacggtcacagtgaagaaccctgtgggcgaggaccaggtcaacctcacagtcaaggtcatcgacgtgccagacgcacctgcggcccccaagatcagcaacgtgggagaggactcctgcacagtacagtgggagccgcctgcctacgatggcgggcagcccatcctgggctacatcctggagcgcaagaagaagaagagctaccggtggatgcggctgaacttcgacctgattcaggagctgagtcatgaagcgcggcgcatgatcgagggcgtggtgtacgagatgcgcgtctacgcggtcaacgccatcggcatgtccaggcccagccctgcctcccagcccttcatgcctatcggtccccccagcgaacccacccacctggcagtagaggacgtctctgacaccacggtctccctcaagtggcggcccccagagcgcgtgggagcaggaggcctggatggctacagcgtggagtactgcccagagggctgctcagagtgggtggctgccctgcaggggctgacagagcacacatcgatactggtgaaggacctgcccacgggggcccggctgcttttccgagtgcgggcacacaatatggcagggcctggagcccctgttaccaccacggagccggtgacagtgcaggagatcctgcaacggccacggcttcagctgcccaggcacctgcgccagaccattcagaagaaggtcggggagcctgtgaaccttctcatccctttccagggcaagccccggcctcaggtgacctggaccaaagaggggcagcccctggcaggcgaggaggtgagcatccgcaacagccccacagacaccatcctgttcatccgggccgctcgccgcgtgcattcaggcacttaccaggtgacggtgcgcattgagaacatggaggacaaggccacgctggtgctgcaggttgttgacaagccaagtcctccccaggatctccgggtgactgacgcctggggtcttaatgtggctctggagtggaagccaccccaggatgtcggcaacacggagctctgggggtacacagtgcagaaagccgacaagaagaccatggagtggttcaccgtcttggagcattaccgccgcacccactgcgtggtgccagagctcatcattggcaatggctactacttccgcgtcttcagccagaatatggttggctttagtgacagagcggccaccaccaaggagcccgtctttatccccagaccaggcatcacctatgagccacccaactataaggccctggacttctccgaggccccaagcttcacccagcccctggtgaaccgctcggtcatcgcgggctacactgctatgctctgctgtgctgtccggggtagccccaagcccaagatttcctggttcaagaatggcctggacctgggagaagacgcccgcttccgcatgttcagcaagcagggagtgttgactctggagattagaaagccctgcccctttgacgggggcatctatgtctgcagggccaccaacttacagggcgaggcacggtgtgagtgccgcctggaggtgcgagtgcctcagtgaaccctggaaggtgccactcccactgtcctttcctaataaaatgaggaaattgcatcgcattgtctgagtaggtgtcattctattctggggggtggggtggggcaggacagcaagggggaggattgggaagacaatagcaggcatgctggggatgcggtgggctctatgggcggccgcaggaacccctagtgatggagttggccactccctctctgcgcgctcgctcgctcactgaggccgggcgaccaaaggtcgcccgacgcccgggctttgcccgggcggcctcagtgagcgagcgagcgcgcag

SEQ ID NO: 12 - DNA, 4663 bp, synthetic construct
  source 1..4663: mol_type = other DNA
agtggagcagcacataactcttgccctctgccttccaagattctggtgctgagacttatggagtgtcttggaggttgccttctgccccccaaccctgctcccagctggccctcccaggcctgggttgctggcctctgctttatcaggattctcaagagggacagctggtttatgttgcatgactgttccctgcatatctgctctggttttaaatagcttatctgagcagctggaggaccacatgggcttatatggcgtggggtacatgttcctgtagccttgtccctggcacctgccaaaatagcagccaacaccccccacccccaccgccatccccctgccccacccgtcccctgtcgcacattcctccctccgcagggctggctcaccaggccccagcccacatgcctgcttaaagccctctccatcctctgcctcacccagtccccgctgagactgagcagacgcctccaggatctgtcggcagctgctgttctgagccaccatgcctgagccggggaagaagccagtctcagcttttagcaagaagccacggtcagtggaagtggccgcaggcagccctgccgtgttcgaggccgagacagagcgggcaggagtgaaggtgcgctggcagcgcggaggcagtgacatcagcgccagcaacaagtacggcctggccacagagggcacacggcatacgctgacagtgcgggaagtgggccctgccgaccagggatcttacgcagtcattgctggctcctccaaggtcaagttcgacctcaaggtcatagaggcaggtaagtactagcagctacaatccagctaccattctgcttttattttatggttgggataaggctggattattctgagtccaagctaggcccttttgctaatcatgttcatacctcttatcttcctcccacagagaaggcagagcccatgctggcccctgcccctgcccctgctgaggccactggagcccctggagaagccccggccccagccgctgagctgggagaaagtgccccaagtcccaaagggtcaagctcagcagctctcaatggtcctacccctggagcccccgatgaccccattggcctcttcgtgatgcggccacaggatggcgaggtgaccgtgggtggcagcatcaccttctcagcccgcgtggccggcgccagcctcctgaagccgcctgtggtcaagtggttcaagggcaaatgggtggacctgagcagcaaggtgggccagcacctgcagctgcacgacagctacgaccgcgccagcaaggtctatctgttcgagctgcacatcaccgatgcccagcctgccttcactggcagctaccgctgtgaggtgtccaccaaggacaaatttgactgctccaacttcaatctcactgtccacgaggccatgggcaccggagacctggacctcctatcagccttccgccgcacgagcctggctggaggtggtcggcggatcagtgatagccatgaggacactgggattctggacttcagctcactgctgaaaaagagagacagtttccggaccccgagggactcgaagctggaggcaccagcagaggaggacgtgtgggagatcctacggcaggcacccccatctgagtacgagcgcatcgccttccagtacggcgtcactgacctgcgcggcatgctaaagaggctcaagggcatgaggcgcgatgagaagaagagcacagcctttcagaagaagctggagccggcctaccaggtgagcaaaggccacaagatccggctgaccgtggaactggctgaccatgacgctgaggtcaaatggctcaagaatggccaggagatccagatgagcggcagcaagtacatctttgagtccatcggtgccaagcgtaccctgaccatcagccagtgctcattggcggacgacgcagcctaccagtgcgtggtgggtggcgagaagtgtagcacggagctctttgtgaaagagccccctgtgctcatcacgcgccccttggaggaccagctggtgatggtggggcagcgggtggagtttgagtgtgaagtatcggaggagggggcgcaagtcaaatggctgaaggacggggtggagctgacccgggaggagaccttcaaataccggttcaagaaggacgggcagagacaccacctgatcatcaacgaggccatgctggaggacgcggggcactatgcactgtgcactagcgggggccaggcgctggctgagctcattgtgcaggaaaagaagctggaggtgtaccagagcatcgcagacctgatggtgggcgcaaaggaccaggcggtgttcaaatgtgaggtctcagatgagaatgttcggggtgtgtggctgaagaatgggaaggagctggtgcccgacagccgcataaaggtgtcccacatcgggcgggtccacaaactgaccattgacgacgtcacacctgccgacgaggctgactacagctttgtgcccgagggcttcgcctgcaacctgtcagccaagctccacttcatggaggtcaagattgacttcgtacccaggcaggaacctcccaagatccacctggactgcccaggccgcataccagacaccattgtggttgtagctggaaataagctacgtctggacgtccctatctctggggaccctgctcccactgtgatctggcagaaggctatcacgcaggggaataaggccccagccaggccagccccagatgccccagaggacacaggtgacagcgatgagtgggtgtttgacaagaagctgctgtgtgagaccgagggccgggtccgcgtggagaccaccaaggaccgcagcatcttcacggtcgagggggcagagaaggaagatgagggcgtctacacggtcacagtgaagaaccctgtgggcgaggaccaggtcaacctcacagtcaaggtcatcgacgtgccagacgcacctgcggcccccaagatcagcaacgtgggagaggactcctgcacagtacagtgggagccgcctgcctacgatggcgggcagcccatcctgggctacatcctggagcgcaagaagaagaagagctaccggtggatgcggctgaacttcgacctgattcaggagctgagtcatgaagcgcggcgcatgatcgagggcgtggtgtacgagatgcgcgtctacgcggtcaacgccatcggcatgtccaggcccagccctgcctcccagcccttcatgcctatcggtccccccagcgaacccacccacctggcagtagaggacgtctctgacaccacggtctccctcaagtggcggcccccagagcgcgtgggagcaggaggcctggatggctacagcgtggagtactgcccagagggctgctcagagtgggtggctgccctgcaggggctgacagagcacacatcgatactggtgaaggacctgcccacgggggcccggctgcttttccgagtgcgggcacacaatatggcagggcctggagcccctgttaccaccacggagccggtgacagtgcaggagatcctgcaacggccacggcttcagctgcccaggcacctgcgccagaccattcagaagaaggtcggggagcctgtgaaccttctcatccctttccagggcaagccccggcctcaggtgacctggaccaaagaggggcagcccctggcaggcgaggaggtgagcatccgcaacagccccacagacaccatcctgttcatccgggccgctcgccgcgtgcattcaggcacttaccaggtgacggtgcgcattgagaacatggaggacaaggccacgctggtgctgcaggttgttgacaagccaagtcctccccaggatctccgggtgactgacgcctggggtcttaatgtggctctggagtggaagccaccccaggatgtcggcaacacggagctctgggggtacacagtgcagaaagccgacaagaagaccatggagtggttcaccgtcttggagcattaccgccgcacccactgcgtggtgccagagctcatcattggcaatggctactacttccgcgtcttcagccagaatatggttggctttagtgacagagcggccaccaccaaggagcccgtctttatccccagaccaggcatcacctatgagccacccaactataaggccctggacttctccgaggccccaagcttcacccagcccctggtgaaccgctcggtcatcgcgggctacactgctatgctctgctgtgctgtccggggtagccccaagcccaagatttcctggttcaagaatggcctggacctgggagaagacgcccgcttccgcatgttcagcaagcagggagtgttgactctggagattagaaagccctgcccctttgacgggggcatctatgtctgcagggccaccaacttacagggcgaggcacggtgtgagtgccgcctggaggtgcgagtgcctcagtgatctgttgtttgcccctcccccgtgccttccttgaccctggaaggtgccactcccactgtcctttcctaataaaatgaggaaattgcatcgcattgtctgagtaggtgtcattctattctggggggtggggtggggcaggacagcaagggggaggattgggaagacaatagcaggcatgctggggatgcggtgggctctatgg

SEQ ID NO: 13 - DNA, 4969 bp, synthetic construct
  source 1..4969: mol_type = other DNA
ttggccactccctctctgcgcgctcgctcgctcactgaggccgcccgggcaaagcccgggcgtcgggcgacctttggtcgcccggcctcagtgagcgagcgagcgcgcagagagggagtggccaactccatcactaggggttcctgcggccgcagtggagcagcacataactcttgccctctgccttccaagattctggtgctgagacttatggagtgtcttggaggttgccttctgccccccaaccctgctcccagctggccctcccaggcctgggttgctggcctctgctttatcaggattctcaagagggacagctggtttatgttgcatgactgttccctgcatatctgctctggttttaaatagcttatctgagcagctggaggaccacatgggcttatatggcgtggggtacatgttcctgtagccttgtccctggcacctgccaaaatagcagccaacaccccccacccccaccgccatccccctgccccacccgtcccctgtcgcacattcctccctccgcagggctggctcaccaggccccagcccacatgcctgcttaaagccctctccatcctctgcctcacccagtccccgctgagactgagcagacgcctccaggatctgtcggcagctgctgttctgagccaccatgcctgagccggggaagaagccagtctcagcttttagcaagaagccacggtcagtggaagtggccgcaggcagccctgccgtgttcgaggccgagacagagcgggcaggagtgaaggtgcgctggcagcgcggaggcagtgacatcagcgccagcaacaagtacggcctggccacagagggcacacggcatacgctgacagtgcgggaagtgggccctgccgaccagggatcttacgcagtcattgctggctcctccaaggtcaagttcgacctcaaggtcatagaggcaggtaagtactagcagctacaatccagctaccattctgcttttattttatggttgggataaggctggattattctgagtccaagctaggcccttttgctaatcatgttcatacctcttatcttcctcccacagagaaggcagagcccatgctggcccctgcccctgcccctgctgaggccactggagcccctggagaagccccggccccagccgctgagctgggagaaagtgccccaagtcccaaagggtcaagctcagcagctctcaatggtcctacccctggagcccccgatgaccccattggcctcttcgtgatgcggccacaggatggcgaggtgaccgtgggtggcagcatcaccttctcagcccgcgtggccggcgccagcctcctgaagccgcctgtggtcaagtggttcaagggcaaatgggtggacctgagcagcaaggtgggccagcacctgcagctgcacgacagctacgaccgcgccagcaaggtctatctgttcgagctgcacatcaccgatgcccagcctgccttcactggcagctaccgctgtgaggtgtccaccaaggacaaatttgactgctccaacttcaatctcactgtccacgaggccatgggcaccggagacctggacctcctatcagccttccgccgcacgagcctggctggaggtggtcggcggatcagtgatagccatgaggacactgggattctggacttcagctcactgctgaaaaagagagacagtttccggaccccgagggactcgaagctggaggcaccagcagaggaggacgtgtgggagatcctacggcaggcacccccatctgagtacgagcgcatcgccttccagtacggcgtcactgacctgcgcggcatgctaaagaggctcaagggcatgaggcgcgatgagaagaagagcacagcctttcagaagaagctggagccggcctaccaggtgagcaaaggccacaagatccggctgaccgtggaactggctgaccatgacgctgaggtcaaatggctcaagaatggccaggagatccagatgagcggcagcaagtacatctttgagtccatcggtgccaagcgtaccctgaccatcagccagtgctcattggcggacgacgcagcctaccagtgcgtggtgggtggcgagaagtgtagcacggagctctttgtgaaagagccccctgtgctcatcacgcgccccttggaggaccagctggtgatggtggggcagcgggtggagtttgagtgtgaagtatcggaggagggggcgcaagtcaaatggctgaaggacggggtggagctgacccgggaggagaccttcaaataccggttcaagaaggacgggcagagacaccacctgatcatcaacgaggccatgctggaggacgcggggcactatgcactgtgcactagcgggggccaggcgctggctgagctcattgtgcaggaaaagaagctggaggtgtaccagagcatcgcagacctgatggtgggcgcaaaggaccaggcggtgttcaaatgtgaggtctcagatgagaatgttcggggtgtgtggctgaagaatgggaaggagctggtgcccgacagccgcataaaggtgtcccacatcgggcgggtccacaaactgaccattgacgacgtcacacctgccgacgaggctgactacagctttgtgcccgagggcttcgcctgcaacctgtcagccaagctccacttcatggaggtcaagattgacttcgtacccaggcaggaacctcccaagatccacctggactgcccaggccgcataccagacaccattgtggttgtagctggaaataagctacgtctggacgtccctatctctggggaccctgctcccactgtgatctggcagaaggctatcacgcaggggaataaggccccagccaggccagccccagatgccccagaggacacaggtgacagcgatgagtgggtgtttgacaagaagctgctgtgtgagaccgagggccgggtccgcgtggagaccaccaaggaccgcagcatcttcacggtcgagggggcagagaaggaagatgagggcgtctacacggtcacagtgaagaaccctgtgggcgaggaccaggtcaacctcacagtcaaggtcatcgacgtgccagacgcacctgcggcccccaagatcagcaacgtgggagaggactcctgcacagtacagtgggagccgcctgcctacgatggcgggcagcccatcctgggctacatcctggagcgcaagaagaagaagagctaccggtggatgcggctgaacttcgacctgattcaggagctgagtcatgaagcgcggcgcatgatcgagggcgtggtgtacgagatgcgcgtctacgcggtcaacgccatcggcatgtccaggcccagccctgcctcccagcccttcatgcctatcggtccccccagcgaacccacccacctggcagtagaggacgtctctgacaccacggtctccctcaagtggcggcccccagagcgcgtgggagcaggaggcctggatggctacagcgtggagtactgcccagagggctgctcagagtgggtggctgccctgcaggggctgacagagcacacatcgatactggtgaaggacctgcccacgggggcccggctgcttttccgagtgcgggcacacaatatggcagggcctggagcccctgttaccaccacggagccggtgacagtgcaggagatcctgcaacggccacggcttcagctgcccaggcacctgcgccagaccattcagaagaaggtcggggagcctgtgaaccttctcatccctttccagggcaagccccggcctcaggtgacctggaccaaagaggggcagcccctggcaggcgaggaggtgagcatccgcaacagccccacagacaccatcctgttcatccgggccgctcgccgcgtgcattcaggcacttaccaggtgacggtgcgcattgagaacatggaggacaaggccacgctggtgctgcaggttgttgacaagccaagtcctccccaggatctccgggtgactgacgcctggggtcttaatgtggctctggagtggaagccaccccaggatgtcggcaacacggagctctgggggtacacagtgcagaaagccgacaagaagaccatggagtggttcaccgtcttggagcattaccgccgcacccactgcgtggtgccagagctcatcattggcaatggctactacttccgcgtcttcagccagaatatggttggctttagtgacagagcggccaccaccaaggagcccgtctttatccccagaccaggcatcacctatgagccacccaactataaggccctggacttctccgaggccccaagcttcacccagcccctggtgaaccgctcggtcatcgcgggctacactgctatgctctgctgtgctgtccggggtagccccaagcccaagatttcctggttcaagaatggcctggacctgggagaagacgcccgcttccgcatgttcagcaagcagggagtgttgactctggagattagaaagccctgcccctttgacgggggcatctatgtctgcagggccaccaacttacagggcgaggcacggtgtgagtgccgcctggaggtgcgagtgcctcagtgatctgttgtttgcccctcccccgtgccttccttgaccctggaaggtgccactcccactgtcctttcctaataaaatgaggaaattgcatcgcattgtctgagtaggtgtcattctattctggggggtggggtggggcaggacagcaagggggaggattgggaagacaatagcaggcatgctggggatgcggtgggctctatgggcggccgcaggaacccctagtgatggagttggccactccctctctgcgcgctcgctcgctcactgaggccgggcgaccaaaggtcgcccgacgcccgggctttgcccgggcggcctcagtgagcgagcgagcgcgcagagagggagtggccaa

SEQ ID NO: 14 - DNA, 4939 bp, synthetic construct
  source 1..4939: mol_type = other DNA
ctgcgcgctcgctcgctcactgaggccgcccgggcaaagcccgggcgtcgggcgacctttggtcgcccggcctcagtgagcgagcgagcgcgcagagagggagtggccaactccatcactaggggttcctgcggccgcagtggagcagcacataactcttgccctctgccttccaagattctggtgctgagacttatggagtgtcttggaggttgccttctgccccccaaccctgctcccagctggccctcccaggcctgggttgctggcctctgctttatcaggattctcaagagggacagctggtttatgttgcatgactgttccctgcatatctgctctggttttaaatagcttatctgagcagctggaggaccacatgggcttatatggcgtggggtacatgttcctgtagccttgtccctggcacctgccaaaatagcagccaacaccccccacccccaccgccatccccctgccccacccgtcccctgtcgcacattcctccctccgcagggctggctcaccaggccccagcccacatgcctgcttaaagccctctccatcctctgcctcacccagtccccgctgagactgagcagacgcctccaggatctgtcggcagctgctgttctgagccaccatgcctgagccggggaagaagccagtctcagcttttagcaagaagccacggtcagtggaagtggccgcaggcagccctgccgtgttcgaggccgagacagagcgggcaggagtgaaggtgcgctggcagcgcggaggcagtgacatcagcgccagcaacaagtacggcctggccacagagggcacacggcatacgctgacagtgcgggaagtgggccctgccgaccagggatcttacgcagtcattgctggctcctccaaggtcaagttcgacctcaaggtcatagaggcaggtaagtactagcagctacaatccagctaccattctgcttttattttatggttgggataaggctggattattctgagtccaagctaggcccttttgctaatcatgttcatacctcttatcttcctcccacagagaaggcagagcccatgctggcccctgcccctgcccctgctgaggccactggagcccctggagaagccccggccccagccgctgagctgggagaaagtgccccaagtcccaaagggtcaagctcagcagctctcaatggtcctacccctggagcccccgatgaccccattggcctcttcgtgatgcggccacaggatggcgaggtgaccgtgggtggcagcatcaccttctcagcccgcgtggccggcgccagcctcctgaagccgcctgtggtcaagtggttcaagggcaaatgggtggacctgagcagcaaggtgggccagcacctgcagctgcacgacagctacgaccgcgccagcaaggtctatctgttcgagctgcacatcaccgatgcccagcctgccttcactggcagctaccgctgtgaggtgtccaccaaggacaaatttgactgctccaacttcaatctcactgtccacgaggccatgggcaccggagacctggacctcctatcagccttccgccgcacgagcctggctggaggtggtcggcggatcagtgatagccatgaggacactgggattctggacttcagctcactgctgaaaaagagagacagtttccggaccccgagggactcgaagctggaggcaccagcagaggaggacgtgtgggagatcctacggcaggcacccccatctgagtacgagcgcatcgccttccagtacggcgtcactgacctgcgcggcatgctaaagaggctcaagggcatgaggcgcgatgagaagaagagcacagcctttcagaagaagctggagccggcctaccaggtgagcaaaggccacaagatccggctgaccgtggaactggctgaccatgacgctgaggtcaaatggctcaagaatggccaggagatccagatgagcggcagcaagtacatctttgagtccatcggtgccaagcgtaccctgaccatcagccagtgctcattggcggacgacgcagcctaccagtgcgtggtgggtggcgagaagtgtagcacggagctctttgtgaaagagccccctgtgctcatcacgcgccccttggaggaccagctggtgatggtggggcagcgggtggagtttgagtgtgaagtatcggaggagggggcgcaagtcaaatggctgaaggacggggtggagctgacccgggaggagaccttcaaataccggttcaagaaggacgggcagagacaccacctgatcatcaacgaggccatgctggaggacgcggggcactatgcactgtgcactagcgggggccaggcgctggctgagctcattgtgcaggaaaagaagctggaggtgtaccagagcatcgcagacctgatggtgggcgcaaaggaccaggcggtgttcaaatgtgaggtctcagatgagaatgttcggggtgtgtggctgaagaatgggaaggagctggtgcccgacagccgcataaaggtgtcccacatcgggcgggtccacaaactgaccattgacgacgtcacacctgccgacgaggctgactacagctttgtgcccgagggcttcgcctgcaacctgtcagccaagctccacttcatggaggtcaagattgacttcgtacccaggcaggaacctcccaagatccacctggactgcccaggccgcataccagacaccattgtggttgtagctggaaataagctacgtctggacgtccctatctctggggaccctgctcccactgtgatctggcagaaggctatcacgcaggggaataaggccccagccaggccagccccagatgccccagaggacacaggtgacagcgatgagtgggtgtttgacaagaagctgctgtgtgagaccgagggccgggtccgcgtggagaccaccaaggaccgcagcatcttcacggtcgagggggcagagaaggaagatgagggcgtctacacggtcacagtgaagaaccctgtgggcgaggaccaggtcaacctcacagtcaaggtcatcgacgtgccagacgcacctgcggcccccaagatcagcaacgtgggagaggactcctgcacagtacagtgggagccgcctgcctacgatggcgggcagcccatcctgggctacatcctggagcgcaagaagaagaagagctaccggtggatgcggctgaacttcgacctgattcaggagctgagtcatgaagcgcggcgcatgatcgagggcgtggtgtacgagatgcgcgtctacgcggtcaacgccatcggcatgtccaggcccagccctgcctcccagcccttcatgcctatcggtccccccagcgaacccacccacctggcagtagaggacgtctctgacaccacggtctccctcaagtggcggcccccagagcgcgtgggagcaggaggcctggatggctacagcgtggagtactgcccagagggctgctcagagtgggtggctgccctgcaggggctgacagagcacacatcgatactggtgaaggacctgcccacgggggcccggctgcttttccgagtgcgggcacacaatatggcagggcctggagcccctgttaccaccacggagccggtgacagtgcaggagatcctgcaacggccacggcttcagctgcccaggcacctgcgccagaccattcagaagaaggtcggggagcctgtgaaccttctcatccctttccagggcaagccccggcctcaggtgacctggaccaaagaggggcagcccctggcaggcgaggaggtgagcatccgcaacagccccacagacaccatcctgttcatccgggccgctcgccgcgtgcattcaggcacttaccaggtgacggtgcgcattgagaacatggaggacaaggccacgctggtgctgcaggttgttgacaagccaagtcctccccaggatctccgggtgactgacgcctggggtcttaatgtggctctggagtggaagccaccccaggatgtcggcaacacggagctctgggggtacacagtgcagaaagccgacaagaagaccatggagtggttcaccgtcttggagcattaccgccgcacccactgcgtggtgccagagctcatcattggcaatggctactacttccgcgtcttcagccagaatatggttggctttagtgacagagcggccaccaccaaggagcccgtctttatccccagaccaggcatcacctatgagccacccaactataaggccctggacttctccgaggccccaagcttcacccagcccctggtgaaccgctcggtcatcgcgggctacactgctatgctctgctgtgctgtccggggtagccccaagcccaagatttcctggttcaagaatggcctggacctgggagaagacgcccgcttccgcatgttcagcaagcagggagtgttgactctggagattagaaagccctgcccctttgacgggggcatctatgtctgcagggccaccaacttacagggcgaggcacggtgtgagtgccgcctggaggtgcgagtgcctcagtgatctgttgtttgcccctcccccgtgccttccttgaccctggaaggtgccactcccactgtcctttcctaataaaatgaggaaattgcatcgcattgtctgagtaggtgtcattctattctggggggtggggtggggcaggacagcaagggggaggattgggaagacaatagcaggcatgctggggatgcggtgggctctatgggcggccgcaggaacccctagtgatggagttggccactccctctctgcgcgctcgctcgctcactgaggccgggcgaccaaaggtcgcccgacgcccgggctttgcccgggcggcctcagtgagcgagcgagcgcgcag

SEQ ID NO: 15 - DNA, 4595 bp, synthetic construct
  source 1..4595: mol_type = other DNA
ctggaagatgtctttacccccagcatcagttcaagtggagcagcacataactcttgccctctgccttccaagattctggtgctgagacttatggagtgtcttggaggttgccttctgccccccaaccctgctcccagctggccctcccaggcctgggttgctggcctctgctttatcaggattctcaagagggacagctggtttatgttgcatgactgttccctgcatatctgctctggttttaaatagcttatctgagcagctggaggaccacatgggcttatatggcgtggggtacatgttcctgtagccttgtccctggcacctgccaaaatagcagccaacaccccccacccccaccgccatccccctgccccacccgtcccctgtcgcacattcctccctccgcagggctggctcaccaggccccagcccacatgcctgcttaaagccctctccatcctctgcctcacccagtccccgctgagactgagcagacgcctccaggatctgtcggcagctgctgttctgagccaccatgcctgagccggggaagaagccagtctcagcttttagcaagaagccacggtcagtggaagtggccgcaggcagccctgccgtgttcgaggccgagacagagcgggcaggagtgaaggtgcgctggcagcgcggaggcagtgacatcagcgccagcaacaagtacggcctggccacagagggcacacggcatacgctgacagtgcgggaagtgggccctgccgaccagggatcttacgcagtcattgctggctcctccaaggtcaagttcgacctcaaggtcatagaggcagagaaggcagagcccatgctggcccctgcccctgcccctgctgaggccactggagcccctggagaagccccggccccagccgctgagctgggagaaagtgccccaagtcccaaagggtcaagctcagcagctctcaatggtcctacccctggagcccccgatgaccccattggcctcttcgtgatgcggccacaggatggcgaggtgaccgtgggtggcagcatcaccttctcagcccgcgtggccggcgccagcctcctgaagccgcctgtggtcaagtggttcaagggcaaatgggtggacctgagcagcaaggtgggccagcacctgcagctgcacgacagctacgaccgcgccagcaaggtctatctgttcgagctgcacatcaccgatgcccagcctgccttcactggcagctaccgctgtgaggtgtccaccaaggacaaatttgactgctccaacttcaatctcactgtccacgaggccatgggcaccggagacctggacctcctatcagccttccgccgcacgagcctggctggaggtggtcggcggatcagtgatagccatgaggacactgggattctggacttcagctcactgctgaaaaagagagacagtttccggaccccgagggactcgaagctggaggcaccagcagaggaggacgtgtgggagatcctacggcaggcacccccatctgagtacgagcgcatcgccttccagtacggcgtcactgacctgcgcggcatgctaaagaggctcaagggcatgaggcgcgatgagaagaagagcacagcctttcagaagaagctggagccggcctaccaggtgagcaaaggccacaagatccggctgaccgtggaactggctgaccatgacgctgaggtcaaatggctcaagaatggccaggagatccagatgagcggcagcaagtacatctttgagtccatcggtgccaagcgtaccctgaccatcagccagtgctcattggcggacgacgcagcctaccagtgcgtggtgggtggcgagaagtgtagcacggagctctttgtgaaagagccccctgtgctcatcacgcgccccttggaggaccagctggtgatggtggggcagcgggtggagtttgagtgtgaagtatcggaggagggggcgcaagtcaaatggctgaaggacggggtggagctgacccgggaggagaccttcaaataccggttcaagaaggacgggcagagacaccacctgatcatcaacgaggccatgctggaggacgcggggcactatgcactgtgcactagcgggggccaggcgctggctgagctcattgtgcaggaaaagaagctggaggtgtaccagagcatcgcagacctgatggtgggcgcaaaggaccaggcggtgttcaaatgtgaggtctcagatgagaatgttcggggtgtgtggctgaagaatgggaaggagctggtgcccgacagccgcataaaggtgtcccacatcgggcgggtccacaaactgaccattgacgacgtcacacctgccgacgaggctgactacagctttgtgcccgagggcttcgcctgcaacctgtcagccaagctccacttcatggaggtcaagattgacttcgtacccaggcaggaacctcccaagatccacctggactgcccaggccgcataccagacaccattgtggttgtagctggaaataagctacgtctggacgtccctatctctggggaccctgctcccactgtgatctggcagaaggctatcacgcaggggaataaggccccagccaggccagccccagatgccccagaggacacaggtgacagcgatgagtgggtgtttgacaagaagctgctgtgtgagaccgagggccgggtccgcgtggagaccaccaaggaccgcagcatcttcacggtcgagggggcagagaaggaagatgagggcgtctacacggtcacagtgaagaaccctgtgggcgaggaccaggtcaacctcacagtcaaggtcatcgacgtgccagacgcacctgcggcccccaagatcagcaacgtgggagaggactcctgcacagtacagtgggagccgcctgcctacgatggcgggcagcccatcctgggctacatcctggagcgcaagaagaagaagagctaccggtggatgcggctgaacttcgacctgattcaggagctgagtcatgaagcgcggcgcatgatcgagggcgtggtgtacgagatgcgcgtctacgcggtcaacgccatcggcatgtccaggcccagccctgcctcccagcccttcatgcctatcggtccccccagcgaacccacccacctggcagtagaggacgtctctgacaccacggtctccctcaagtggcggcccccagagcgcgtgggagcaggaggcctggatggctacagcgtggagtactgcccagagggctgctcagagtgggtggctgccctgcaggggctgacagagcacacatcgatactggtgaaggacctgcccacgggggcccggctgcttttccgagtgcgggcacacaatatggcagggcctggagcccctgttaccaccacggagccggtgacagtgcaggagatcctgcaacggccacggcttcagctgcccaggcacctgcgccagaccattcagaagaaggtcggggagcctgtgaaccttctcatccctttccagggcaagccccggcctcaggtgacctggaccaaagaggggcagcccctggcaggcgaggaggtgagcatccgcaacagccccacagacaccatcctgttcatccgggccgctcgccgcgtgcattcaggcacttaccaggtgacggtgcgcattgagaacatggaggacaaggccacgctggtgctgcaggttgttgacaagccaagtcctccccaggatctccgggtgactgacgcctggggtcttaatgtggctctggagtggaagccaccccaggatgtcggcaacacggagctctgggggtacacagtgcagaaagccgacaagaagaccatggagtggttcaccgtcttggagcattaccgccgcacccactgcgtggtgccagagctcatcattggcaatggctactacttccgcgtcttcagccagaatatggttggctttagtgacagagcggccaccaccaaggagcccgtctttatccccagaccaggcatcacctatgagccacccaactataaggccctggacttctccgaggccccaagcttcacccagcccctggtgaaccgctcggtcatcgcgggctacactgctatgctctgctgtgctgtccggggtagccccaagcccaagatttcctggttcaagaatggcctggacctgggagaagacgcccgcttccgcatgttcagcaagcagggagtgttgactctggagattagaaagccctgcccctttgacgggggcatctatgtctgcagggccaccaacttacagggcgaggcacggtgtgagtgccgcctggaggtgcgagtgcctcagtgacctcgagctgtgccttctagttgccagccatctgttgtttgcccctcccccgtgccttccttgaccctggaaggtgccactcccactgtcctttcctaataaaatgaggaaattgcatcgcattgtctgagtaggtgtcattctattctggggggtggggtggggcaggacagcaagggggaggattgggaagacaatagcaggcatgctggggatgcggtgggctctatgg

SEQ ID NO: 16 - DNA, 4901 bp, synthetic construct
  source 1..4901: mol_type = other DNA
ttggccactccctctctgcgcgctcgctcgctcactgaggccgcccgggcaaagcccgggcgtcgggcgacctttggtcgcccggcctcagtgagcgagcgagcgcgcagagagggagtggccaactccatcactaggggttcctgcggccgcctggaagatgtctttacccccagcatcagttcaagtggagcagcacataactcttgccctctgccttccaagattctggtgctgagacttatggagtgtcttggaggttgccttctgccccccaaccctgctcccagctggccctcccaggcctgggttgctggcctctgctttatcaggattctcaagagggacagctggtttatgttgcatgactgttccctgcatatctgctctggttttaaatagcttatctgagcagctggaggaccacatgggcttatatggcgtggggtacatgttcctgtagccttgtccctggcacctgccaaaatagcagccaacaccccccacccccaccgccatccccctgccccacccgtcccctgtcgcacattcctccctccgcagggctggctcaccaggccccagcccacatgcctgcttaaagccctctccatcctctgcctcacccagtccccgctgagactgagcagacgcctccaggatctgtcggcagctgctgttctgagccaccatgcctgagccggggaagaagccagtctcagcttttagcaagaagccacggtcagtggaagtggccgcaggcagccctgccgtgttcgaggccgagacagagcgggcaggagtgaaggtgcgctggcagcgcggaggcagtgacatcagcgccagcaacaagtacggcctggccacagagggcacacggcatacgctgacagtgcgggaagtgggccctgccgaccagggatcttacgcagtcattgctggctcctccaaggtcaagttcgacctcaaggtcatagaggcagagaaggcagagcccatgctggcccctgcccctgcccctgctgaggccactggagcccctggagaagccccggccccagccgctgagctgggagaaagtgccccaagtcccaaagggtcaagctcagcagctctcaatggtcctacccctggagcccccgatgaccccattggcctcttcgtgatgcggccacaggatggcgaggtgaccgtgggtggcagcatcaccttctcagcccgcgtggccggcgccagcctcctgaagccgcctgtggtcaagtggttcaagggcaaatgggtggacctgagcagcaaggtgggccagcacctgcagctgcacgacagctacgaccgcgccagcaaggtctatctgttcgagctgcacatcaccgatgcccagcctgccttcactggcagctaccgctgtgaggtgtccaccaaggacaaatttgactgctccaacttcaatctcactgtccacgaggccatgggcaccggagacctggacctcctatcagccttccgccgcacgagcctggctggaggtggtcggcggatcagtgatagccatgaggacactgggattctggacttcagctcactgctgaaaaagagagacagtttccggaccccgagggactcgaagctggaggcaccagcagaggaggacgtgtgggagatcctacggcaggcacccccatctgagtacgagcgcatcgccttccagtacggcgtcactgacctgcgcggcatgctaaagaggctcaagggcatgaggcgcgatgagaagaagagcacagcctttcagaagaagctggagccggcctaccaggtgagcaaaggccacaagatccggctgaccgtggaactggctgaccatgacgctgaggtcaaatggctcaagaatggccaggagatccagatgagcggcagcaagtacatctttgagtccatcggtgccaagcgtaccctgaccatcagccagtgctcattggcggacgacgcagcctaccagtgcgtggtgggtggcgagaagtgtagcacggagctctttgtgaaagagccccctgtgctcatcacgcgccccttggaggaccagctggtgatggtggggcagcgggtggagtttgagtgtgaagtatcggaggagggggcgcaagtcaaatggctgaaggacggggtggagctgacccgggaggagaccttcaaataccggttcaagaaggacgggcagagacaccacctgatcatcaacgaggccatgctggaggacgcggggcactatgcactgtgcactagcgggggccaggcgctggctgagctcattgtgcaggaaaagaagctggaggtgtaccagagcatcgcagacctgatggtgggcgcaaaggaccaggcggtgttcaaatgtgaggtctcagatgagaatgttcggggtgtgtggctgaagaatgggaaggagctggtgcccgacagccgcataaaggtgtcccacatcgggcgggtccacaaactgaccattgacgacgtcacacctgccgacgaggctgactacagctttgtgcccgagggcttcgcctgcaacctgtcagccaagctccacttcatggaggtcaagattgacttcgtacccaggcaggaacctcccaagatccacctggactgcccaggccgcataccagacaccattgtggttgtagctggaaataagctacgtctggacgtccctatctctggggaccctgctcccactgtgatctggcagaaggctatcacgcaggggaataaggccccagccaggccagccccagatgccccagaggacacaggtgacagcgatgagtgggtgtttgacaagaagctgctgtgtgagaccgagggccgggtccgcgtggagaccaccaaggaccgcagcatcttcacggtcgagggggcagagaaggaagatgagggcgtctacacggtcacagtgaagaaccctgtgggcgaggaccaggtcaacctcacagtcaaggtcatcgacgtgccagacgcacctgcggcccccaagatcagcaacgtgggagaggactcctgcacagtacagtgggagccgcctgcctacgatggcgggcagcccatcctgggctacatcctggagcgcaagaagaagaagagctaccggtggatgcggctgaacttcgacctgattcaggagctgagtcatgaagcgcggcgcatgatcgagggcgtggtgtacgagatgcgcgtctacgcggtcaacgccatcggcatgtccaggcccagccctgcctcccagcccttcatgcctatcggtccccccagcgaacccacccacctggcagtagaggacgtctctgacaccacggtctccctcaagtggcggcccccagagcgcgtgggagcaggaggcctggatggctacagcgtggagtactgcccagagggctgctcagagtgggtggctgccctgcaggggctgacagagcacacatcgatactggtgaaggacctgcccacgggggcccggctgcttttccgagtgcgggcacacaatatggcagggcctggagcccctgttaccaccacggagccggtgacagtgcaggagatcctgcaacggccacggcttcagctgcccaggcacctgcgccagaccattcagaagaaggtcggggagcctgtgaaccttctcatccctttccagggcaagccccggcctcaggtgacctggaccaaagaggggcagcccctggcaggcgaggaggtgagcatccgcaacagccccacagacaccatcctgttcatccgggccgctcgccgcgtgcattcaggcacttaccaggtgacggtgcgcattgagaacatggaggacaaggccacgctggtgctgcaggttgttgacaagccaagtcctccccaggatctccgggtgactgacgcctggggtcttaatgtggctctggagtggaagccaccccaggatgtcggcaacacggagctctgggggtacacagtgcagaaagccgacaagaagaccatggagtggttcaccgtcttggagcattaccgccgcacccactgcgtggtgccagagctcatcattggcaatggctactacttccgcgtcttcagccagaatatggttggctttagtgacagagcggccaccaccaaggagcccgtctttatccccagaccaggcatcacctatgagccacccaactataaggccctggacttctccgaggccccaagcttcacccagcccctggtgaaccgctcggtcatcgcgggctacactgctatgctctgctgtgctgtccggggtagccccaagcccaagatttcctggttcaagaatggcctggacctgggagaagacgcccgcttccgcatgttcagcaagcagggagtgttgactctggagattagaaagccctgcccctttgacgggggcatctatgtctgcagggccaccaacttacagggcgaggcacggtgtgagtgccgcctggaggtgcgagtgcctcagtgacctcgagctgtgccttctagttgccagccatctgttgtttgcccctcccccgtgccttccttgaccctggaaggtgccactcccactgtcctttcctaataaaatgaggaaattgcatcgcattgtctgagtaggtgtcattctattctggggggtggggtggggcaggacagcaagggggaggattgggaagacaatagcaggcatgctggggatgcggtgggctctatgggcggccgcaggaacccctagtgatggagttggccactccctctctgcgcgctcgctcgctcactgaggccgggcgaccaaaggtcgcccgacgcccgggctttgcccgggcggcctcagtgagcgagcgagcgcgcagagagggagtggccaa

SEQ ID NO: 17 - DNA, 4871 bp, synthetic construct
  source 1..4871: mol_type = other DNA
ctgcgcgctcgctcgctcactgaggccgcccgggcaaagcccgggcgtcgggcgacctttggtcgcccggcctcagtgagcgagcgagcgcgcagagagggagtggccaactccatcactaggggttcctgcggccgcctggaagatgtctttacccccagcatcagttcaagtggagcagcacataactcttgccctctgccttccaagattctggtgctgagacttatggagtgtcttggaggttgccttctgccccccaaccctgctcccagctggccctcccaggcctgggttgctggcctctgctttatcaggattctcaagagggacagctggtttatgttgcatgactgttccctgcatatctgctctggttttaaatagcttatctgagcagctggaggaccacatgggcttatatggcgtggggtacatgttcctgtagccttgtccctggcacctgccaaaatagcagccaacaccccccacccccaccgccatccccctgccccacccgtcccctgtcgcacattcctccctccgcagggctggctcaccaggccccagcccacatgcctgcttaaagccctctccatcctctgcctcacccagtccccgctgagactgagcagacgcctccaggatctgtcggcagctgctgttctgagccaccatgcctgagccggggaagaagccagtctcagcttttagcaagaagccacggtcagtggaagtggccgcaggcagccctgccgtgttcgaggccgagacagagcgggcaggagtgaaggtgcgctggcagcgcggaggcagtgacatcagcgccagcaacaagtacggcctggccacagagggcacacggcatacgctgacagtgcgggaagtgggccctgccgaccagggatcttacgcagtcattgctggctcctccaaggtcaagttcgacctcaaggtcatagaggcagagaaggcagagcccatgctggcccctgcccctgcccctgctgaggccactggagcccctggagaagccccggccccagccgctgagctgggagaaagtgccccaagtcccaaagggtcaagctcagcagctctcaatggtcctacccctggagcccccgatgaccccattggcctcttcgtgatgcggccacaggatggcgaggtgaccgtgggtggcagcatcaccttctcagcccgcgtggccggcgccagcctcctgaagccgcctgtggtcaagtggttcaagggcaaatgggtggacctgagcagcaaggtgggccagcacctgcagctgcacgacagctacgaccgcgccagcaaggtctatctgttcgagctgcacatcaccgatgcccagcctgccttcactggcagctaccgctgtgaggtgtccaccaaggacaaatttgactgctccaacttcaatctcactgtccacgaggccatgggcaccggagacctggacctcctatcagccttccgccgcacgagcctggctggaggtggtcggcggatcagtgatagccatgaggacactgggattctggacttcagctcactgctgaaaaagagagacagtttccggaccccgagggactcgaagctggaggcaccagcagaggaggacgtgtgggagatcctacggcaggcacccccatctgagtacgagcgcatcgccttccagtacggcgtcactgacctgcgcggcatgctaaagaggctcaagggcatgaggcgcgatgagaagaagagcacagcctttcagaagaagctggagccggcctaccaggtgagcaaaggccacaagatccggctgaccgtggaactggctgaccatgacgctgaggtcaaatggctcaagaatggccaggagatccagatgagcggcagcaagtacatctttgagtccatcggtgccaagcgtaccctgaccatcagccagtgctcattggcggacgacgcagcctaccagtgcgtggtgggtggcgagaagtgtagcacggagctctttgtgaaagagccccctgtgctcatcacgcgccccttggaggaccagctggtgatggtggggcagcgggtggagtttgagtgtgaagtatcggaggagggggcgcaagtcaaatggctgaaggacggggtggagctgacccgggaggagaccttcaaataccggttcaagaaggacgggcagagacaccacctgatcatcaacgaggccatgctggaggacgcggggcactatgcactgtgcactagcgggggccaggcgctggctgagctcattgtgcaggaaaagaagctggaggtgtaccagagcatcgcagacctgatggtgggcgcaaaggaccaggcggtgttcaaatgtgaggtctcagatgagaatgttcggggtgtgtggctgaagaatgggaaggagctggtgcccgacagccgcataaaggtgtcccacatcgggcgggtccacaaactgaccattgacgacgtcacacctgccgacgaggctgactacagctttgtgcccgagggcttcgcctgcaacctgtcagccaagctccacttcatggaggtcaagattgacttcgtacccaggcaggaacctcccaagatccacctggactgcccaggccgcataccagacaccattgtggttgtagctggaaataagctacgtctggacgtccctatctctggggaccctgctcccactgtgatctggcagaaggctatcacgcaggggaataaggccccagccaggccagccccagatgccccagaggacacaggtgacagcgatgagtgggtgtttgacaagaagctgctgtgtgagaccgagggccgggtccgcgtggagaccaccaaggaccgcagcatcttcacggtcgagggggcagagaaggaagatgagggcgtctacacggtcacagtgaagaaccctgtgggcgaggaccaggtcaacctcacagtcaaggtcatcgacgtgccagacgcacctgcggcccccaagatcagcaacgtgggagaggactcctgcacagtacagtgggagccgcctgcctacgatggcgggcagcccatcctgggctacatcctggagcgcaagaagaagaagagctaccggtggatgcggctgaacttcgacctgattcaggagctgagtcatgaagcgcggcgcatgatcgagggcgtggtgtacgagatgcgcgtctacgcggtcaacgccatcggcatgtccaggcccagccctgcctcccagcccttcatgcctatcggtccccccagcgaacccacccacctggcagtagaggacgtctctgacaccacggtctccctcaagtggcggcccccagagcgcgtgggagcaggaggcctggatggctacagcgtggagtactgcccagagggctgctcagagtgggtggctgccctgcaggggctgacagagcacacatcgatactggtgaaggacctgcccacgggggcccggctgcttttccgagtgcgggcacacaatatggcagggcctggagcccctgttaccaccacggagccggtgacagtgcaggagatcctgcaacggccacggcttcagctgcccaggcacctgcgccagaccattcagaagaaggtcggggagcctgtgaaccttctcatccctttccagggcaagccccggcctcaggtgacctggaccaaagaggggcagcccctggcaggcgaggaggtgagcatccgcaacagccccacagacaccatcctgttcatccgggccgctcgccgcgtgcattcaggcacttaccaggtgacggtgcgcattgagaacatggaggacaaggccacgctggtgctgcaggttgttgacaagccaagtcctccccaggatctccgggtgactgacgcctggggtcttaatgtggctctggagtggaagccaccccaggatgtcggcaacacggagctctgggggtacacagtgcagaaagccgacaagaagaccatggagtggttcaccgtcttggagcattaccgccgcacccactgcgtggtgccagagctcatcattggcaatggctactacttccgcgtcttcagccagaatatggttggctttagtgacagagcggccaccaccaaggagcccgtctttatccccagaccaggcatcacctatgagccacccaactataaggccctggacttctccgaggccccaagcttcacccagcccctggtgaaccgctcggtcatcgcgggctacactgctatgctctgctgtgctgtccggggtagccccaagcccaagatttcctggttcaagaatggcctggacctgggagaagacgcccgcttccgcatgttcagcaagcagggagtgttgactctggagattagaaagccctgcccctttgacgggggcatctatgtctgcagggccaccaacttacagggcgaggcacggtgtgagtgccgcctggaggtgcgagtgcctcagtgacctcgagctgtgccttctagttgccagccatctgttgtttgcccctcccccgtgccttccttgaccctggaaggtgccactcccactgtcctttcctaataaaatgaggaaattgcatcgcattgtctgagtaggtgtcattctattctggggggtggggtggggcaggacagcaagggggaggattgggaagacaatagcaggcatgctggggatgcggtgggctctatgggcggccgcaggaacccctagtgatggagttggccactccctctctgcgcgctcgctcgctcactgaggccgggcgaccaaaggtcgcccgacgcccgggctttgcccgggcggcctcagtgagcgagcgagcgcgcag

SEQ ID NO: 18 - DNA, 4726 bp, synthetic construct
  source 1..4726: mol_type = other DNA
ctggaagatgtctttacccccagcatcagttcaagtggagcagcacataactcttgccctctgccttccaagattctggtgctgagacttatggagtgtcttggaggttgccttctgccccccaaccctgctcccagctggccctcccaggcctgggttgctggcctctgctttatcaggattctcaagagggacagctggtttatgttgcatgactgttccctgcatatctgctctggttttaaatagcttatctgagcagctggaggaccacatgggcttatatggcgtggggtacatgttcctgtagccttgtccctggcacctgccaaaatagcagccaacaccccccacccccaccgccatccccctgccccacccgtcccctgtcgcacattcctccctccgcagggctggctcaccaggccccagcccacatgcctgcttaaagccctctccatcctctgcctcacccagtccccgctgagactgagcagacgcctccaggatctgtcggcagctgctgttctgagccaccatgcctgagccggggaagaagccagtctcagcttttagcaagaagccacggtcagtggaagtggccgcaggcagccctgccgtgttcgaggccgagacagagcgggcaggagtgaaggtgcgctggcagcgcggaggcagtgacatcagcgccagcaacaagtacggcctggccacagagggcacacggcatacgctgacagtgcgggaagtgggccctgccgaccagggatcttacgcagtcattgctggctcctccaaggtcaagttcgacctcaaggtcatagaggcaggtaagtactagcagctacaatccagctaccattctgcttttattttatggttgggataaggctggattattctgagtccaagctaggcccttttgctaatcatgttcatacctcttatcttcctcccacagagaaggcagagcccatgctggcccctgcccctgcccctgctgaggccactggagcccctggagaagccccggccccagccgctgagctgggagaaagtgccccaagtcccaaagggtcaagctcagcagctctcaatggtcctacccctggagcccccgatgaccccattggcctcttcgtgatgcggccacaggatggcgaggtgaccgtgggtggcagcatcaccttctcagcccgcgtggccggcgccagcctcctgaagccgcctgtggtcaagtggttcaagggcaaatgggtggacctgagcagcaaggtgggccagcacctgcagctgcacgacagctacgaccgcgccagcaaggtctatctgttcgagctgcacatcaccgatgcccagcctgccttcactggcagctaccgctgtgaggtgtccaccaaggacaaatttgactgctccaacttcaatctcactgtccacgaggccatgggcaccggagacctggacctcctatcagccttccgccgcacgagcctggctggaggtggtcggcggatcagtgatagccatgaggacactgggattctggacttcagctcactgctgaaaaagagagacagtttccggaccccgagggactcgaagctggaggcaccagcagaggaggacgtgtgggagatcctacggcaggcacccccatctgagtacgagcgcatcgccttccagtacggcgtcactgacctgcgcggcatgctaaagaggctcaagggcatgaggcgcgatgagaagaagagcacagcctttcagaagaagctggagccggcctaccaggtgagcaaaggccacaagatccggctgaccgtggaactggctgaccatgacgctgaggtcaaatggctcaagaatggccaggagatccagatgagcggcagcaagtacatctttgagtccatcggtgccaagcgtaccctgaccatcagccagtgctcattggcggacgacgcagcctaccagtgcgtggtgggtggcgagaagtgtagcacggagctctttgtgaaagagccccctgtgctcatcacgcgccccttggaggaccagctggtgatggtggggcagcgggtggagtttgagtgtgaagtatcggaggagggggcgcaagtcaaatggctgaaggacggggtggagctgacccgggaggagaccttcaaataccggttcaagaaggacgggcagagacaccacctgatcatcaacgaggccatgctggaggacgcggggcactatgcactgtgcactagcgggggccaggcgctggctgagctcattgtgcaggaaaagaagctggaggtgtaccagagcatcgcagacctgatggtgggcgcaaaggaccaggcggtgttcaaatgtgaggtctcagatgagaatgttcggggtgtgtggctgaagaatgggaaggagctggtgcccgacagccgcataaaggtgtcccacatcgggcgggtccacaaactgaccattgacgacgtcacacctgccgacgaggctgactacagctttgtgcccgagggcttcgcctgcaacctgtcagccaagctccacttcatggaggtcaagattgacttcgtacccaggcaggaacctcccaagatccacctggactgcccaggccgcataccagacaccattgtggttgtagctggaaataagctacgtctggacgtccctatctctggggaccctgctcccactgtgatctggcagaaggctatcacgcaggggaataaggccccagccaggccagccccagatgccccagaggacacaggtgacagcgatgagtgggtgtttgacaagaagctgctgtgtgagaccgagggccgggtccgcgtggagaccaccaaggaccgcagcatcttcacggtcgagggggcagagaaggaagatgagggcgtctacacggtcacagtgaagaaccctgtgggcgaggaccaggtcaacctcacagtcaaggtcatcgacgtgccagacgcacctgcggcccccaagatcagcaacgtgggagaggactcctgcacagtacagtgggagccgcctgcctacgatggcgggcagcccatcctgggctacatcctggagcgcaagaagaagaagagctaccggtggatgcggctgaacttcgacctgattcaggagctgagtcatgaagcgcggcgcatgatcgagggcgtggtgtacgagatgcgcgtctacgcggtcaacgccatcggcatgtccaggcccagccctgcctcccagcccttcatgcctatcggtccccccagcgaacccacccacctggcagtagaggacgtctctgacaccacggtctccctcaagtggcggcccccagagcgcgtgggagcaggaggcctggatggctacagcgtggagtactgcccagagggctgctcagagtgggtggctgccctgcaggggctgacagagcacacatcgatactggtgaaggacctgcccacgggggcccggctgcttttccgagtgcgggcacacaatatggcagggcctggagcccctgttaccaccacggagccggtgacagtgcaggagatcctgcaacggccacggcttcagctgcccaggcacctgcgccagaccattcagaagaaggtcggggagcctgtgaaccttctcatccctttccagggcaagccccggcctcaggtgacctggaccaaagaggggcagcccctggcaggcgaggaggtgagcatccgcaacagccccacagacaccatcctgttcatccgggccgctcgccgcgtgcattcaggcacttaccaggtgacggtgcgcattgagaacatggaggacaaggccacgctggtgctgcaggttgttgacaagccaagtcctccccaggatctccgggtgactgacgcctggggtcttaatgtggctctggagtggaagccaccccaggatgtcggcaacacggagctctgggggtacacagtgcagaaagccgacaagaagaccatggagtggttcaccgtcttggagcattaccgccgcacccactgcgtggtgccagagctcatcattggcaatggctactacttccgcgtcttcagccagaatatggttggctttagtgacagagcggccaccaccaaggagcccgtctttatccccagaccaggcatcacctatgagccacccaactataaggccctggacttctccgaggccccaagcttcacccagcccctggtgaaccgctcggtcatcgcgggctacactgctatgctctgctgtgctgtccggggtagccccaagcccaagatttcctggttcaagaatggcctggacctgggagaagacgcccgcttccgcatgttcagcaagcagggagtgttgactctggagattagaaagccctgcccctttgacgggggcatctatgtctgcagggccaccaacttacagggcgaggcacggtgtgagtgccgcctggaggtgcgagtgcctcagtgacctcgagctgtgccttctagttgccagccatctgttgtttgcccctcccccgtgccttccttgaccctggaaggtgccactcccactgtcctttcctaataaaatgaggaaattgcatcgcattgtctgagtaggtgtcattctattctggggggtggggtggggcaggacagcaagggggaggattgggaagacaatagcaggcatgctggggatgcggtgggctctatgg

SEQ ID NO: 19 - DNA, 5032 bp, synthetic construct
  source 1..5032: mol_type = other DNA
ttggccactccctctctgcgcgctcgctcgctcactgaggccgcccgggcaaagcccgggcgtcgggcgacctttggtcgcccggcctcagtgagcgagcgagcgcgcagagagggagtggccaactccatcactaggggttcctgcggccgcctggaagatgtctttacccccagcatcagttcaagtggagcagcacataactcttgccctctgccttccaagattctggtgctgagacttatggagtgtcttggaggttgccttctgccccccaaccctgctcccagctggccctcccaggcctgggttgctggcctctgctttatcaggattctcaagagggacagctggtttatgttgcatgactgttccctgcatatctgctctggttttaaatagcttatctgagcagctggaggaccacatgggcttatatggcgtggggtacatgttcctgtagccttgtccctggcacctgccaaaatagcagccaacaccccccacccccaccgccatccccctgccccacccgtcccctgtcgcacattcctccctccgcagggctggctcaccaggccccagcccacatgcctgcttaaagccctctccatcctctgcctcacccagtccccgctgagactgagcagacgcctccaggatctgtcggcagctgctgttctgagccaccatgcctgagccggggaagaagccagtctcagcttttagcaagaagccacggtcagtggaagtggccgcaggcagccctgccgtgttcgaggccgagacagagcgggcaggagtgaaggtgcgctggcagcgcggaggcagtgacatcagcgccagcaacaagtacggcctggccacagagggcacacggcatacgctgacagtgcgggaagtgggccctgccgaccagggatcttacgcagtcattgctggctcctccaaggtcaagttcgacctcaaggtcatagaggcaggtaagtactagcagctacaatccagctaccattctgcttttattttatggttgggataaggctggattattctgagtccaagctaggcccttttgctaatcatgttcatacctcttatcttcctcccacagagaaggcagagcccatgctggcccctgcccctgcccctgctgaggccactggagcccctggagaagccccggccccagccgctgagctgggagaaagtgccccaagtcccaaagggtcaagctcagcagctctcaatggtcctacccctggagcccccgatgaccccattggcctcttcgtgatgcggccacaggatggcgaggtgaccgtgggtggcagcatcaccttctcagcccgcgtggccggcgccagcctcctgaagccgcctgtggtcaagtggttcaagggcaaatgggtggacctgagcagcaaggtgggccagcacctgcagctgcacgacagctacgaccgcgccagcaaggtctatctgttcgagctgcacatcaccgatgcccagcctgccttcactggcagctaccgctgtgaggtgtccaccaaggacaaatttgactgctccaacttcaatctcactgtccacgaggccatgggcaccggagacctggacctcctatcagccttccgccgcacgagcctggctggaggtggtcggcggatcagtgatagccatgaggacactgggattctggacttcagctcactgctgaaaaagagagacagtttccggaccccgagggactcgaagctggaggcaccagcagaggaggacgtgtgggagatcctacggcaggcacccccatctgagtacgagcgcatcgccttccagtacggcgtcactgacctgcgcggcatgctaaagaggctcaagggcatgaggcgcgatgagaagaagagcacagcctttcagaagaagctggagccggcctaccaggtgagcaaaggccacaagatccggctgaccgtggaactggctgaccatgacgctgaggtcaaatggctcaagaatggccaggagatccagatgagcggcagcaagtacatctttgagtccatcggtgccaagcgtaccctgaccatcagccagtgctcattggcggacgacgcagcctaccagtgcgtggtgggtggcgagaagtgtagcacggagctctttgtgaaagagccccctgtgctcatcacgcgccccttggaggaccagctggtgatggtggggcagcgggtggagtttgagtgtgaagtatcggaggagggggcgcaagtcaaatggctgaaggacggggtggagctgacccgggaggagaccttcaaataccggttcaagaaggacgggcagagacaccacctgatcatcaacgaggccatgctggaggacgcggggcactatgcactgtgcactagcgggggccaggcgctggctgagctcattgtgcaggaaaagaagctggaggtgtaccagagcatcgcagacctgatggtgggcgcaaaggaccaggcggtgttcaaatgtgaggtctcagatgagaatgttcggggtgtgtggctgaagaatgggaaggagctggtgcccgacagccgcataaaggtgtcccacatcgggcgggtccacaaactgaccattgacgacgtcacacctgccgacgaggctgactacagctttgtgcccgagggcttcgcctgcaacctgtcagccaagctccacttcatggaggtcaagattgacttcgtacccaggcaggaacctcccaagatccacctggactgcccaggccgcataccagacaccattgtggttgtagctggaaataagctacgtctggacgtccctatctctggggaccctgctcccactgtgatctggcagaaggctatcacgcaggggaataaggccccagccaggccagccccagatgccccagaggacacaggtgacagcgatgagtgggtgtttgacaagaagctgctgtgtgagaccgagggccgggtccgcgtggagaccaccaaggaccgcagcatcttcacggtcgagggggcagagaaggaagatgagggcgtctacacggtcacagtgaagaaccctgtgggcgaggaccaggtcaacctcacagtcaaggtcatcgacgtgccagacgcacctgcggcccccaagatcagcaacgtgggagaggactcctgcacagtacagtgggagccgcctgcctacgatggcgggcagcccatcctgggctacatcctggagcgcaagaagaagaagagctaccggtggatgcggctgaacttcgacctgattcaggagctgagtcatgaagcgcggcgcatgatcgagggcgtggtgtacgagatgcgcgtctacgcggtcaacgccatcggcatgtccaggcccagccctgcctcccagcccttcatgcctatcggtccccccagcgaacccacccacctggcagtagaggacgtctctgacaccacggtctccctcaagtggcggcccccagagcgcgtgggagcaggaggcctggatggctacagcgtggagtactgcccagagggctgctcagagtgggtggctgccctgcaggggctgacagagcacacatcgatactggtgaaggacctgcccacgggggcccggctgcttttccgagtgcgggcacacaatatggcagggcctggagcccctgttaccaccacggagccggtgacagtgcaggagatcctgcaacggccacggcttcagctgcccaggcacctgcgccagaccattcagaagaaggtcggggagcctgtgaaccttctcatccctttccagggcaagccccggcctcaggtgacctggaccaaagaggggcagcccctggcaggcgaggaggtgagcatccgcaacagccccacagacaccatcctgttcatccgggccgctcgccgcgtgcattcaggcacttaccaggtgacggtgcgcattgagaacatggaggacaaggccacgctggtgctgcaggttgttgacaagccaagtcctccccaggatctccgggtgactgacgcctggggtcttaatgtggctctggagtggaagccaccccaggatgtcggcaacacggagctctgggggtacacagtgcagaaagccgacaagaagaccatggagtggttcaccgtcttggagcattaccgccgcacccactgcgtggtgccagagctcatcattggcaatggctactacttccgcgtcttcagccagaatatggttggctttagtgacagagcggccaccaccaaggagcccgtctttatccccagaccaggcatcacctatgagccacccaactataaggccctggacttctccgaggccccaagcttcacccagcccctggtgaaccgctcggtcatcgcgggctacactgctatgctctgctgtgctgtccggggtagccccaagcccaagatttcctggttcaagaatggcctggacctgggagaagacgcccgcttccgcatgttcagcaagcagggagtgttgactctggagattagaaagccctgcccctttgacgggggcatctatgtctgcagggccaccaacttacagggcgaggcacggtgtgagtgccgcctggaggtgcgagtgcctcagtgacctcgagctgtgccttctagttgccagccatctgttgtttgcccctcccccgtgccttccttgaccctggaaggtgccactcccactgtcctttcctaataaaatgaggaaattgcatcgcattgtctgagtaggtgtcattctattctggggggtggggtggggcaggacagcaagggggaggattgggaagacaatagcaggcatgctggggatgcggtgggctctatgggcggccgcaggaacccctagtgatggagttggccactccctctctgcgcgctcgctcgctcactgaggccgggcgaccaaaggtcgcccgacgcccgggctttgcccgggcggcctcagtgagcgagcgagcgcgcagagagggagtggccaa

SEQ ID NO: 20 - DNA, 5002 bp, synthetic construct
  source 1..5002: mol_type = other DNA
ctgcgcgctcgctcgctcactgaggccgcccgggcaaagcccgggcgtcgggcgacctttggtcgcccggcctcagtgagcgagcgagcgcgcagagagggagtggccaactccatcactaggggttcctgcggccgcctggaagatgtctttacccccagcatcagttcaagtggagcagcacataactcttgccctctgccttccaagattctggtgctgagacttatggagtgtcttggaggttgccttctgccccccaaccctgctcccagctggccctcccaggcctgggttgctggcctctgctttatcaggattctcaagagggacagctggtttatgttgcatgactgttccctgcatatctgctctggttttaaatagcttatctgagcagctggaggaccacatgggcttatatggcgtggggtacatgttcctgtagccttgtccctggcacctgccaaaatagcagccaacaccccccacccccaccgccatccccctgccccacccgtcccctgtcgcacattcctccctccgcagggctggctcaccaggccccagcccacatgcctgcttaaagccctctccatcctctgcctcacccagtccccgctgagactgagcagacgcctccaggatctgtcggcagctgctgttctgagccaccatgcctgagccggggaagaagccagtctcagcttttagcaagaagccacggtcagtggaagtggccgcaggcagccctgccgtgttcgaggccgagacagagcgggcaggagtgaaggtgcgctggcagcgcggaggcagtgacatcagcgccagcaacaagtacggcctggccacagagggcacacggcatacgctgacagtgcgggaagtgggccctgccgaccagggatcttacgcagtcattgctggctcctccaaggtcaagttcgacctcaaggtcatagaggcaggtaagtactagcagctacaatccagctaccattctgcttttattttatggttgggataaggctggattattctgagtccaagctaggcccttttgctaatcatgttcatacctcttatcttcctcccacagagaaggcagagcccatgctggcccctgcccctgcccctgctgaggccactggagcccctggagaagccccggccccagccgctgagctgggagaaagtgccccaagtcccaaagggtcaagctcagcagctctcaatggtcctacccctggagcccccgatgaccccattggcctcttcgtgatgcggccacaggatggcgaggtgaccgtgggtggcagcatcaccttctcagcccgcgtggccggcgccagcctcctgaagccgcctgtggtcaagtggttcaagggcaaatgggtggacctgagcagcaaggtgggccagcacctgcagctgcacgacagctacgaccgcgccagcaaggtctatctgttcgagctgcacatcaccgatgcccagcctgccttcactggcagctaccgctgtgaggtgtccaccaaggacaaatttgactgctccaacttcaatctcactgtccacgaggccatgggcaccggagacctggacctcctatcagccttccgccgcacgagcctggctggaggtggtcggcggatcagtgatagccatgaggacactgggattctggacttcagctcactgctgaaaaagagagacagtttccggaccccgagggactcgaagctggaggcaccagcagaggaggacgtgtgggagatcctacggcaggcacccccatctgagtacgagcgcatcgccttccagtacggcgtcactgacctgcgcggcatgctaaagaggctcaagggcatgaggcgcgatgagaagaagagcacagcctttcagaagaagctggagccggcctaccaggtgagcaaaggccacaagatccggctgaccgtggaactggctgaccatgacgctgaggtcaaatggctcaagaatggccaggagatccagatgagcggcagcaagtacatctttgagtccatcggtgccaagcgtaccctgaccatcagccagtgctcattggcggacgacgcagcctaccagtgcgtggtgggtggcgagaagtgtagcacggagctctttgtgaaagagccccctgtgctcatcacgcgccccttggaggaccagctggtgatggtggggcagcgggtggagtttgagtgtgaagtatcggaggagggggcgcaagtcaaatggctgaaggacggggtggagctgacccgggaggagaccttcaaataccggttcaagaaggacgggcagagacaccacctgatcatcaacgaggccatgctggaggacgcggggcactatgcactgtgcactagcgggggccaggcgctggctgagctcattgtgcaggaaaagaagctggaggtgtaccagagcatcgcagacctgatggtgggcgcaaaggaccaggcggtgttcaaatgtgaggtctcagatgagaatgttcggggtgtgtggctgaagaatgggaaggagctggtgcccgacagccgcataaaggtgtcccacatcgggcgggtccacaaactgaccattgacgacgtcacacctgccgacgaggctgactacagctttgtgcccgagggcttcgcctgcaacctgtcagccaagctccacttcatggaggtcaagattgacttcgtacccaggcaggaacctcccaagatccacctggactgcccaggccgcataccagacaccattgtggttgtagctggaaataagctacgtctggacgtccctatctctggggaccctgctcccactgtgatctggcagaaggctatcacgcaggggaataaggccccagccaggccagccccagatgccccagaggacacaggtgacagcgatgagtgggtgtttgacaagaagctgctgtgtgagaccgagggccgggtccgcgtggagaccaccaaggaccgcagcatcttcacggtcgagggggcagagaaggaagatgagggcgtctacacggtcacagtgaagaaccctgtgggcgaggaccaggtcaacctcacagtcaaggtcatcgacgtgccagacgcacctgcggcccccaagatcagcaacgtgggagaggactcctgcacagtacagtgggagccgcctgcctacgatggcgggcagcccatcctgggctacatcctggagcgcaagaagaagaagagctaccggtggatgcggctgaacttcgacctgattcaggagctgagtcatgaagcgcggcgcatgatcgagggcgtggtgtacgagatgcgcgtctacgcggtcaacgccatcggcatgtccaggcccagccctgcctcccagcccttcatgcctatcggtccccccagcgaacccacccacctggcagtagaggacgtctctgacaccacggtctccctcaagtggcggcccccagagcgcgtgggagcaggaggcctggatggctacagcgtggagtactgcccagagggctgctcagagtgggtggctgccctgcaggggctgacagagcacacatcgatactggtgaaggacctgcccacgggggcccggctgcttttccgagtgcgggcacacaatatggcagggcctggagcccctgttaccaccacggagccggtgacagtgcaggagatcctgcaacggccacggcttcagctgcccaggcacctgcgccagaccattcagaagaaggtcggggagcctgtgaaccttctcatccctttccagggcaagccccggcctcaggtgacctggaccaaagaggggcagcccctggcaggcgaggaggtgagcatccgcaacagccccacagacaccatcctgttcatccgggccgctcgccgcgtgcattcaggcacttaccaggtgacggtgcgcattgagaacatggaggacaaggccacgctggtgctgcaggttgttgacaagccaagtcctccccaggatctccgggtgactgacgcctggggtcttaatgtggctctggagtggaagccaccccaggatgtcggcaacacggagctctgggggtacacagtgcagaaagccgacaagaagaccatggagtggttcaccgtcttggagcattaccgccgcacccactgcgtggtgccagagctcatcattggcaatggctactacttccgcgtcttcagccagaatatggttggctttagtgacagagcggccaccaccaaggagcccgtctttatccccagaccaggcatcacctatgagccacccaactataaggccctggacttctccgaggccccaagcttcacccagcccctggtgaaccgctcggtcatcgcgggctacactgctatgctctgctgtgctgtccggggtagccccaagcccaagatttcctggttcaagaatggcctggacctgggagaagacgcccgcttccgcatgttcagcaagcagggagtgttgactctggagattagaaagccctgcccctttgacgggggcatctatgtctgcagggccaccaacttacagggcgaggcacggtgtgagtgccgcctggaggtgcgagtgcctcagtgacctcgagctgtgccttctagttgccagccatctgttgtttgcccctcccccgtgccttccttgaccctggaaggtgccactcccactgtcctttcctaataaaatgaggaaattgcatcgcattgtctgagtaggtgtcattctattctggggggtggggtggggcaggacagcaagggggaggattgggaagacaatagcaggcatgctggggatgcggtgggctctatgggcggccgcaggaacccctagtgatggagttggccactccctctctgcgcgctcgctcgctcactgaggccgggcgaccaaaggtcgcccgacgcccgggctttgcccgggcggcctcagtgagcgagcgagcgcgcag

SEQ ID NO: 21 - DNA, 4505 bp, synthetic construct
  source 1..4505: mol_type = other DNA
ccttccaagattctggtgctgagacttatggagtgtcttggaggttgccttctgccccccaaccctgctcccagctggccctcccaggcctgggttgctggcctctgctttatcaggattctcaagagggacagctggtttatgttgcatgactgttccctgcatatctgctctggttttaaatagcttatctgagcagctggaggaccacatgggcttatatggcgtggggtacatgttcctgtagccttgtccctggcacctgccaaaatagcagccaacaccccccacccccaccgccatccccctgccccacccgtcccctgtcgcacattcctccctccgcagggctggctcaccaggccccagcccacatgcctgcttaaagccctctccatcctctgcctcacccagtccccgctgagactgagcagacgcctccaggatctgtcggcagctgctgttctgagccaccatgcctgagccggggaagaagccagtctcagcttttagcaagaagccacggtcagtggaagtggccgcaggcagccctgccgtgttcgaggccgagacagagcgggcaggagtgaaggtgcgctggcagcgcggaggcagtgacatcagcgccagcaacaagtacggcctggccacagagggcacacggcatacgctgacagtgcgggaagtgggccctgccgaccagggatcttacgcagtcattgctggctcctccaaggtcaagttcgacctcaaggtcatagaggcaggtaagtactagcagctacaatccagctaccattctgcttttattttatggttgggataaggctggattattctgagtccaagctaggcccttttgctaatcatgttcatacctcttatcttcctcccacagagaaggcagagcccatgctggcccctgcccctgcccctgctgaggccactggagcccctggagaagccccggccccagccgctgagctgggagaaagtgccccaagtcccaaagggtcaagctcagcagctctcaatggtcctacccctggagcccccgatgaccccattggcctcttcgtgatgcggccacaggatggcgaggtgaccgtgggtggcagcatcaccttctcagcccgcgtggccggcgccagcctcctgaagccgcctgtggtcaagtggttcaagggcaaatgggtggacctgagcagcaaggtgggccagcacctgcagctgcacgacagctacgaccgcgccagcaaggtctatctgttcgagctgcacatcaccgatgcccagcctgccttcactggcagctaccgctgtgaggtgtccaccaaggacaaatttgactgctccaacttcaatctcactgtccacgaggccatgggcaccggagacctggacctcctatcagccttccgccgcacgagcctggctggaggtggtcggcggatcagtgatagccatgaggacactgggattctggacttcagctcactgctgaaaaagagagacagtttccggaccccgagggactcgaagctggaggcaccagcagaggaggacgtgtgggagatcctacggcaggcacccccatctgagtacgagcgcatcgccttccagtacggcgtcactgacctgcgcggcatgctaaagaggctcaagggcatgaggcgcgatgagaagaagagcacagcctttcagaagaagctggagccggcctaccaggtgagcaaaggccacaagatccggctgaccgtggaactggctgaccatgacgctgaggtcaaatggctcaagaatggccaggagatccagatgagcggcagcaagtacatctttgagtccatcggtgccaagcgtaccctgaccatcagccagtgctcattggcggacgacgcagcctaccagtgcgtggtgggtggcgagaagtgtagcacggagctctttgtgaaagagccccctgtgctcatcacgcgccccttggaggaccagctggtgatggtggggcagcgggtggagtttgagtgtgaagtatcggaggagggggcgcaagtcaaatggctgaaggacggggtggagctgacccgggaggagaccttcaaataccggttcaagaaggacgggcagagacaccacctgatcatcaacgaggccatgctggaggacgcggggcactatgcactgtgcactagcgggggccaggcgctggctgagctcattgtgcaggaaaagaagctggaggtgtaccagagcatcgcagacctgatggtgggcgcaaaggaccaggcggtgttcaaatgtgaggtctcagatgagaatgttcggggtgtgtggctgaagaatgggaaggagctggtgcccgacagccgcataaaggtgtcccacatcgggcgggtccacaaactgaccattgacgacgtcacacctgccgacgaggctgactacagctttgtgcccgagggcttcgcctgcaacctgtcagccaagctccacttcatggaggtcaagattgacttcgtacccaggcaggaacctcccaagatccacctggactgcccaggccgcataccagacaccattgtggttgtagctggaaataagctacgtctggacgtccctatctctggggaccctgctcccactgtgatctggcagaaggctatcacgcaggggaataaggccccagccaggccagccccagatgccccagaggacacaggtgacagcgatgagtgggtgtttgacaagaagctgctgtgtgagaccgagggccgggtccgcgtggagaccaccaaggaccgcagcatcttcacggtcgagggggcagagaaggaagatgagggcgtctacacggtcacagtgaagaaccctgtgggcgaggaccaggtcaacctcacagtcaaggtcatcgacgtgccagacgcacctgcggcccccaagatcagcaacgtgggagaggactcctgcacagtacagtgggagccgcctgcctacgatggcgggcagcccatcctgggctacatcctggagcgcaagaagaagaagagctaccggtggatgcggctgaacttcgacctgattcaggagctgagtcatgaagcgcggcgcatgatcgagggcgtggtgtacgagatgcgcgtctacgcggtcaacgccatcggcatgtccaggcccagccctgcctcccagcccttcatgcctatcggtccccccagcgaacccacccacctggcagtagaggacgtctctgacaccacggtctccctcaagtggcggcccccagagcgcgtgggagcaggaggcctggatggctacagcgtggagtactgcccagagggctgctcagagtgggtggctgccctgcaggggctgacagagcacacatcgatactggtgaaggacctgcccacgggggcccggctgcttttccgagtgcgggcacacaatatggcagggcctggagcccctgttaccaccacggagccggtgacagtgcaggagatcctgcaacggccacggcttcagctgcccaggcacctgcgccagaccattcagaagaaggtcggggagcctgtgaaccttctcatccctttccagggcaagccccggcctcaggtgacctggaccaaagaggggcagcccctggcaggcgaggaggtgagcatccgcaacagccccacagacaccatcctgttcatccgggccgctcgccgcgtgcattcaggcacttaccaggtgacggtgcgcattgagaacatggaggacaaggccacgctggtgctgcaggttgttgacaagccaagtcctccccaggatctccgggtgactgacgcctggggtcttaatgtggctctggagtggaagccaccccaggatgtcggcaacacggagctctgggggtacacagtgcagaaagccgacaagaagaccatggagtggttcaccgtcttggagcattaccgccgcacccactgcgtggtgccagagctcatcattggcaatggctactacttccgcgtcttcagccagaatatggttggctttagtgacagagcggccaccaccaaggagcccgtctttatccccagaccaggcatcacctatgagccacccaactataaggccctggacttctccgaggccccaagcttcacccagcccctggtgaaccgctcggtcatcgcgggctacactgctatgctctgctgtgctgtccggggtagccccaagcccaagatttcctggttcaagaatggcctggacctgggagaagacgcccgcttccgcatgttcagcaagcagggagtgttgactctggagattagaaagccctgcccctttgacgggggcatctatgtctgcagggccaccaacttacagggcgaggcacggtgtgagtgccgcctggaggtgcgagtgcctcagtgacctcgagccaataaaggatcgtttattttcattggaagcgtgtgttggttttttgatcaggcgcgtccaagctt

SEQ ID NO: 22 - DNA, 4811 bp, synthetic construct
  source 1..4811: mol_type = other DNA
ttggccactccctctctgcgcgctcgctcgctcactgaggccgcccgggcaaagcccgggcgtcgggcgacctttggtcgcccggcctcagtgagcgagcgagcgcgcagagagggagtggccaactccatcactaggggttcctgcggccgcccttccaagattctggtgctgagacttatggagtgtcttggaggttgccttctgccccccaaccctgctcccagctggccctcccaggcctgggttgctggcctctgctttatcaggattctcaagagggacagctggtttatgttgcatgactgttccctgcatatctgctctggttttaaatagcttatctgagcagctggaggaccacatgggcttatatggcgtggggtacatgttcctgtagccttgtccctggcacctgccaaaatagcagccaacaccccccacccccaccgccatccccctgccccacccgtcccctgtcgcacattcctccctccgcagggctggctcaccaggccccagcccacatgcctgcttaaagccctctccatcctctgcctcacccagtccccgctgagactgagcagacgcctccaggatctgtcggcagctgctgttctgagccaccatgcctgagccggggaagaagccagtctcagcttttagcaagaagccacggtcagtggaagtggccgcaggcagccctgccgtgttcgaggccgagacagagcgggcaggagtgaaggtgcgctggcagcgcggaggcagtgacatcagcgccagcaacaagtacggcctggccacagagggcacacggcatacgctgacagtgcgggaagtgggccctgccgaccagggatcttacgcagtcattgctggctcctccaaggtcaagttcgacctcaaggtcatagaggcaggtaagtactagcagctacaatccagctaccattctgcttttattttatggttgggataaggctggattattctgagtccaagctaggcccttttgctaatcatgttcatacctcttatcttcctcccacagagaaggcagagcccatgctggcccctgcccctgcccctgctgaggccactggagcccctggagaagccccggccccagccgctgagctgggagaaagtgccccaagtcccaaagggtcaagctcagcagctctcaatggtcctacccctggagcccccgatgaccccattggcctcttcgtgatgcggccacaggatggcgaggtgaccgtgggtggcagcatcaccttctcagcccgcgtggccggcgccagcctcctgaagccgcctgtggtcaagtggttcaagggcaaatgggtggacctgagcagcaaggtgggccagcacctgcagctgcacgacagctacgaccgcgccagcaaggtctatctgttcgagctgcacatcaccgatgcccagcctgccttcactggcagctaccgctgtgaggtgtccaccaaggacaaatttgactgctccaacttcaatctcactgtccacgaggccatgggcaccggagacctggacctcctatcagccttccgccgcacgagcctggctggaggtggtcggcggatcagtgatagccatgaggacactgggattctggacttcagctcactgctgaaaaagagagacagtttccggaccccgagggactcgaagctggaggcaccagcagaggaggacgtgtgggagatcctacggcaggcacccccatctgagtacgagcgcatcgccttccagtacggcgtcactgacctgcgcggcatgctaaagaggctcaagggcatgaggcgcgatgagaagaagagcacagcctttcagaagaagctggagccggcctaccaggtgagcaaaggccacaagatccggctgaccgtggaactggctgaccatgacgctgaggtcaaatggctcaagaatggccaggagatccagatgagcggcagcaagtacatctttgagtccatcggtgccaagcgtaccctgaccatcagccagtgctcattggcggacgacgcagcctaccagtgcgtggtgggtggcgagaagtgtagcacggagctctttgtgaaagagccccctgtgctcatcacgcgccccttggaggaccagctggtgatggtggggcagcgggtggagtttgagtgtgaagtatcggaggagggggcgcaagtcaaatggctgaaggacggggtggagctgacccgggaggagaccttcaaataccggttcaagaaggacgggcagagacaccacctgatcatcaacgaggccatgctggaggacgcggggcactatgcactgtgcactagcgggggccaggcgctggctgagctcattgtgcaggaaaagaagctggaggtgtaccagagcatcgcagacctgatggtgggcgcaaaggaccaggcggtgttcaaatgtgaggtctcagatgagaatgttcggggtgtgtggctgaagaatgggaaggagctggtgcccgacagccgcataaaggtgtcccacatcgggcgggtccacaaactgaccattgacgacgtcacacctgccgacgaggctgactacagctttgtgcccgagggcttcgcctgcaacctgtcagccaagctccacttcatggaggtcaagattgacttcgtacccaggcaggaacctcccaagatccacctggactgcccaggccgcataccagacaccattgtggttgtagctggaaataagctacgtctggacgtccctatctctggggaccctgctcccactgtgatctggcagaaggctatcacgcaggggaataaggccccagccaggccagccccagatgccccagaggacacaggtgacagcgatgagtgggtgtttgacaagaagctgctgtgtgagaccgagggccgggtccgcgtggagaccaccaaggaccgcagcatcttcacggtcgagggggcagagaaggaagatgagggcgtctacacggtcacagtgaagaaccctgtgggcgaggaccaggtcaacctcacagtcaaggtcatcgacgtgccagacgcacctgcggcccccaagatcagcaacgtgggagaggactcctgcacagtacagtgggagccgcctgcctacgatggcgggcagcccatcctgggctacatcctggagcgcaagaagaagaagagctaccggtggatgcggctgaacttcgacctgattcaggagctgagtcatgaagcgcggcgcatgatcgagggcgtggtgtacgagatgcgcgtctacgcggtcaacgccatcggcatgtccaggcccagccctgcctcccagcccttcatgcctatcggtccccccagcgaacccacccacctggcagtagaggacgtctctgacaccacggtctccctcaagtggcggcccccagagcgcgtgggagcaggaggcctggatggctacagcgtggagtactgcccagagggctgctcagagtgggtggctgccctgcaggggctgacagagcacacatcgatactggtgaaggacctgcccacgggggcccggctgcttttccgagtgcgggcacacaatatggcagggcctggagcccctgttaccaccacggagccggtgacagtgcaggagatcctgcaacggccacggcttcagctgcccaggcacctgcgccagaccattcagaagaaggtcggggagcctgtgaaccttctcatccctttccagggcaagccccggcctcaggtgacctggaccaaagaggggcagcccctggcaggcgaggaggtgagcatccgcaacagccccacagacaccatcctgttcatccgggccgctcgccgcgtgcattcaggcacttaccaggtgacggtgcgcattgagaacatggaggacaaggccacgctggtgctgcaggttgttgacaagccaagtcctccccaggatctccgggtgactgacgcctggggtcttaatgtggctctggagtggaagccaccccaggatgtcggcaacacggagctctgggggtacacagtgcagaaagccgacaagaagaccatggagtggttcaccgtcttggagcattaccgccgcacccactgcgtggtgccagagctcatcattggcaatggctactacttccgcgtcttcagccagaatatggttggctttagtgacagagcggccaccaccaaggagcccgtctttatccccagaccaggcatcacctatgagccacccaactataaggccctggacttctccgaggccccaagcttcacccagcccctggtgaaccgctcggtcatcgcgggctacactgctatgctctgctgtgctgtccggggtagccccaagcccaagatttcctggttcaagaatggcctggacctgggagaagacgcccgcttccgcatgttcagcaagcagggagtgttgactctggagattagaaagccctgcccctttgacgggggcatctatgtctgcagggccaccaacttacagggcgaggcacggtgtgagtgccgcctggaggtgcgagtgcctcagtgacctcgagccaataaaggatcgtttattttcattggaagcgtgtgttggttttttgatcaggcgcgtccaagcttgcggccgcaggaacccctagtgatggagttggccactccctctctgcgcgctcgctcgctcactgaggccgggcgaccaaaggtcgcccgacgcccgggctttgcccgggcggcctcagtgagcgagcgagcgcgcagagagggagtggccaa

SEQ ID NO: 23 - DNA, 4781 bp, synthetic construct
  source 1..4781: mol_type = other DNA
ctgcgcgctcgctcgctcactgaggccgcccgggcaaagcccgggcgtcgggcgacctttggtcgcccggcctcagtgagcgagcgagcgcgcagagagggagtggccaactccatcactaggggttcctgcggccgcccttccaagattctggtgctgagacttatggagtgtcttggaggttgccttctgccccccaaccctgctcccagctggccctcccaggcctgggttgctggcctctgctttatcaggattctcaagagggacagctggtttatgttgcatgactgttccctgcatatctgctctggttttaaatagcttatctgagcagctggaggaccacatgggcttatatggcgtggggtacatgttcctgtagccttgtccctggcacctgccaaaatagcagccaacaccccccacccccaccgccatccccctgccccacccgtcccctgtcgcacattcctccctccgcagggctggctcaccaggccccagcccacatgcctgcttaaagccctctccatcctctgcctcacccagtccccgctgagactgagcagacgcctccaggatctgtcggcagctgctgttctgagccaccatgcctgagccggggaagaagccagtctcagcttttagcaagaagccacggtcagtggaagtggccgcaggcagccctgccgtgttcgaggccgagacagagcgggcaggagtgaaggtgcgctggcagcgcggaggcagtgacatcagcgccagcaacaagtacggcctggccacagagggcacacggcatacgctgacagtgcgggaagtgggccctgccgaccagggatcttacgcagtcattgctggctcctccaaggtcaagttcgacctcaaggtcatagaggcaggtaagtactagcagctacaatccagctaccattctgcttttattttatggttgggataaggctggattattctgagtccaagctaggcccttttgctaatcatgttcatacctcttatcttcctcccacagagaaggcagagcccatgctggcccctgcccctgcccctgctgaggccactggagcccctggagaagccccggccccagccgctgagctgggagaaagtgccccaagtcccaaagggtcaagctcagcagctctcaatggtcctacccctggagcccccgatgaccccattggcctcttcgtgatgcggccacaggatggcgaggtgaccgtgggtggcagcatcaccttctcagcccgcgtggccggcgccagcctcctgaagccgcctgtggtcaagtggttcaagggcaaatgggtggacctgagcagcaaggtgggccagcacctgcagctgcacgacagctacgaccgcgccagcaaggtctatctgttcgagctgcacatcaccgatgcccagcctgccttcactggcagctaccgctgtgaggtgtccaccaaggacaaatttgactgctccaacttcaatctcactgtccacgaggccatgggcaccggagacctggacctcctatcagccttccgccgcacgagcctggctggaggtggtcggcggatcagtgatagccatgaggacactgggattctggacttcagctcactgctgaaaaagagagacagtttccggaccccgagggactcgaagctggaggcaccagcagaggaggacgtgtgggagatcctacggcaggcacccccatctgagtacgagcgcatcgccttccagtacggcgtcactgacctgcgcggcatgctaaagaggctcaagggcatgaggcgcgatgagaagaagagcacagcctttcagaagaagctggagccggcctaccaggtgagcaaaggccacaagatccggctgaccgtggaactggctgaccatgacgctgaggtcaaatggctcaagaatggccaggagatccagatgagcggcagcaagtacatctttgagtccatcggtgccaagcgtaccctgaccatcagccagtgctcattggcggacgacgcagcctaccagtgcgtggtgggtggcgagaagtgtagcacggagctctttgtgaaagagccccctgtgctcatcacgcgccccttggaggaccagctggtgatggtggggcagcgggtggagtttgagtgtgaagtatcggaggagggggcgcaagtcaaatggctgaaggacggggtggagctgacccgggaggagaccttcaaataccggttcaagaaggacgggcagagacaccacctgatcatcaacgaggccatgctggaggacgcggggcactatgcactgtgcactagcgggggccaggcgctggctgagctcattgtgcaggaaaagaagctggaggtgtaccagagcatcgcagacctgatggtgggcgcaaaggaccaggcggtgttcaaatgtgaggtctcagatgagaatgttcggggtgtgtggctgaagaatgggaaggagctggtgcccgacagccgcataaaggtgtcccacatcgggcgggtccacaaactgaccattgacgacgtcacacctgccgacgaggctgactacagctttgtgcccgagggcttcgcctgcaacctgtcagccaagctccacttcatggaggtcaagattgacttcgtacccaggcaggaacctcccaagatccacctggactgcccaggccgcataccagacaccattgtggttgtagctggaaataagctacgtctggacgtccctatctctggggaccctgctcccactgtgatctggcagaaggctatcacgcaggggaataaggccccagccaggccagccccagatgccccagaggacacaggtgacagcgatgagtgggtgtttgacaagaagctgctgtgtgagaccgagggccgggtccgcgtggagaccaccaaggaccgcagcatcttcacggtcgagggggcagagaaggaagatgagggcgtctacacggtcacagtgaagaaccctgtgggcgaggaccaggtcaacctcacagtcaaggtcatcgacgtgccagacgcacctgcggcccccaagatcagcaacgtgggagaggactcctgcacagtacagtgggagccgcctgcctacgatggcgggcagcccatcctgggctacatcctggagcgcaagaagaagaagagctaccggtggatgcggctgaacttcgacctgattcaggagctgagtcatgaagcgcggcgcatgatcgagggcgtggtgtacgagatgcgcgtctacgcggtcaacgccatcggcatgtccaggcccagccctgcctcccagcccttcatgcctatcggtccccccagcgaacccacccacctggcagtagaggacgtctctgacaccacggtctccctcaagtggcggcccccagagcgcgtgggagcaggaggcctggatggctacagcgtggagtactgcccagagggctgctcagagtgggtggctgccctgcaggggctgacagagcacacatcgatactggtgaaggacctgcccacgggggcccggctgcttttccgagtgcgggcacacaatatggcagggcctggagcccctgttaccaccacggagccggtgacagtgcaggagatcctgcaacggccacggcttcagctgcccaggcacctgcgccagaccattcagaagaaggtcggggagcctgtgaaccttctcatccctttccagggcaagccccggcctcaggtgacctggaccaaagaggggcagcccctggcaggcgaggaggtgagcatccgcaacagccccacagacaccatcctgttcatccgggccgctcgccgcgtgcattcaggcacttaccaggtgacggtgcgcattgagaacatggaggacaaggccacgctggtgctgcaggttgttgacaagccaagtcctccccaggatctccgggtgactgacgcctggggtcttaatgtggctctggagtggaagccaccccaggatgtcggcaacacggagctctgggggtacacagtgcagaaagccgacaagaagaccatggagtggttcaccgtcttggagcattaccgccgcacccactgcgtggtgccagagctcatcattggcaatggctactacttccgcgtcttcagccagaatatggttggctttagtgacagagcggccaccaccaaggagcccgtctttatccccagaccaggcatcacctatgagccacccaactataaggccctggacttctccgaggccccaagcttcacccagcccctggtgaaccgctcggtcatcgcgggctacactgctatgctctgctgtgctgtccggggtagccccaagcccaagatttcctggttcaagaatggcctggacctgggagaagacgcccgcttccgcatgttcagcaagcagggagtgttgactctggagattagaaagccctgcccctttgacgggggcatctatgtctgcagggccaccaacttacagggcgaggcacggtgtgagtgccgcctggaggtgcgagtgcctcagtgacctcgagccaataaaggatcgtttattttcattggaagcgtgtgttggttttttgatcaggcgcgtccaagcttgcggccgcaggaacccctagtgatggagttggccactccctctctgcgcgctcgctcgctcactgaggccgggcgaccaaaggtcgcccgacgcccgggctttgcccgggcggcctcagtgagcgagcgagcgcgcag

SEQ ID NO: 24 - DNA, 4568 bp, synthetic construct
  source 1..4568: mol_type = other DNA
ctggaagatgtctttacccccagcatcagttcaagtggagcagcacataactcttgccctctgccttccaagattctggtgctgagacttatggagtgtcttggaggttgccttctgccccccaaccctgctcccagctggccctcccaggcctgggttgctggcctctgctttatcaggattctcaagagggacagctggtttatgttgcatgactgttccctgcatatctgctctggttttaaatagcttatctgagcagctggaggaccacatgggcttatatggcgtggggtacatgttcctgtagccttgtccctggcacctgccaaaatagcagccaacaccccccacccccaccgccatccccctgccccacccgtcccctgtcgcacattcctccctccgcagggctggctcaccaggccccagcccacatgcctgcttaaagccctctccatcctctgcctcacccagtccccgctgagactgagcagacgcctccaggatctgtcggcagctgctgttctgagccaccatgcctgagccggggaagaagccagtctcagcttttagcaagaagccacggtcagtggaagtggccgcaggcagccctgccgtgttcgaggccgagacagagcgggcaggagtgaaggtgcgctggcagcgcggaggcagtgacatcagcgccagcaacaagtacggcctggccacagagggcacacggcatacgctgacagtgcgggaagtgggccctgccgaccagggatcttacgcagtcattgctggctcctccaaggtcaagttcgacctcaaggtcatagaggcaggtaagtactagcagctacaatccagctaccattctgcttttattttatggttgggataaggctggattattctgagtccaagctaggcccttttgctaatcatgttcatacctcttatcttcctcccacagagaaggcagagcccatgctggcccctgcccctgcccctgctgaggccactggagcccctggagaagccccggccccagccgctgagctgggagaaagtgccccaagtcccaaagggtcaagctcagcagctctcaatggtcctacccctggagcccccgatgaccccattggcctcttcgtgatgcggccacaggatggcgaggtgaccgtgggtggcagcatcaccttctcagcccgcgtggccggcgccagcctcctgaagccgcctgtggtcaagtggttcaagggcaaatgggtggacctgagcagcaaggtgggccagcacctgcagctgcacgacagctacgaccgcgccagcaaggtctatctgttcgagctgcacatcaccgatgcccagcctgccttcactggcagctaccgctgtgaggtgtccaccaaggacaaatttgactgctccaacttcaatctcactgtccacgaggccatgggcaccggagacctggacctcctatcagccttccgccgcacgagcctggctggaggtggtcggcggatcagtgatagccatgaggacactgggattctggacttcagctcactgctgaaaaagagagacagtttccggaccccgagggactcgaagctggaggcaccagcagaggaggacgtgtgggagatcctacggcaggcacccccatctgagtacgagcgcatcgccttccagtacggcgtcactgacctgcgcggcatgctaaagaggctcaagggcatgaggcgcgatgagaagaagagcacagcctttcagaagaagctggagccggcctaccaggtgagcaaaggccacaagatccggctgaccgtggaactggctgaccatgacgctgaggtcaaatggctcaagaatggccaggagatccagatgagcggcagcaagtacatctttgagtccatcggtgccaagcgtaccctgaccatcagccagtgctcattggcggacgacgcagcctaccagtgcgtggtgggtggcgagaagtgtagcacggagctctttgtgaaagagccccctgtgctcatcacgcgccccttggaggaccagctggtgatggtggggcagcgggtggagtttgagtgtgaagtatcggaggagggggcgcaagtcaaatggctgaaggacggggtggagctgacccgggaggagaccttcaaataccggttcaagaaggacgggcagagacaccacctgatcatcaacgaggccatgctggaggacgcggggcactatgcactgtgcactagcgggggccaggcgctggctgagctcattgtgcaggaaaagaagctggaggtgtaccagagcatcgcagacctgatggtgggcgcaaaggaccaggcggtgttcaaatgtgaggtctcagatgagaatgttcggggtgtgtggctgaagaatgggaaggagctggtgcccgacagccgcataaaggtgtcccacatcgggcgggtccacaaactgaccattgacgacgtcacacctgccgacgaggctgactacagctttgtgcccgagggcttcgcctgcaacctgtcagccaagctccacttcatggaggtcaagattgacttcgtacccaggcaggaacctcccaagatccacctggactgcccaggccgcataccagacaccattgtggttgtagctggaaataagctacgtctggacgtccctatctctggggaccctgctcccactgtgatctggcagaaggctatcacgcaggggaataaggccccagccaggccagccccagatgccccagaggacacaggtgacagcgatgagtgggtgtttgacaagaagctgctgtgtgagaccgagggccgggtccgcgtggagaccaccaaggaccgcagcatcttcacggtcgagggggcagagaaggaagatgagggcgtctacacggtcacagtgaagaaccctgtgggcgaggaccaggtcaacctcacagtcaaggtcatcgacgtgccagacgcacctgcggcccccaagatcagcaacgtgggagaggactcctgcacagtacagtgggagccgcctgcctacgatggcgggcagcccatcctgggctacatcctggagcgcaagaagaagaagagctaccggtggatgcggctgaacttcgacctgattcaggagctgagtcatgaagcgcggcgcatgatcgagggcgtggtgtacgagatgcgcgtctacgcggtcaacgccatcggcatgtccaggcccagccctgcctcccagcccttcatgcctatcggtccccccagcgaacccacccacctggcagtagaggacgtctctgacaccacggtctccctcaagtggcggcccccagagcgcgtgggagcaggaggcctggatggctacagcgtggagtactgcccagagggctgctcagagtgggtggctgccctgcaggggctgacagagcacacatcgatactggtgaaggacctgcccacgggggcccggctgcttttccgagtgcgggcacacaatatggcagggcctggagcccctgttaccaccacggagccggtgacagtgcaggagatcctgcaacggccacggcttcagctgcccaggcacctgcgccagaccattcagaagaaggtcggggagcctgtgaaccttctcatccctttccagggcaagccccggcctcaggtgacctggaccaaagaggggcagcccctggcaggcgaggaggtgagcatccgcaacagccccacagacaccatcctgttcatccgggccgctcgccgcgtgcattcaggcacttaccaggtgacggtgcgcattgagaacatggaggacaaggccacgctggtgctgcaggttgttgacaagccaagtcctccccaggatctccgggtgactgacgcctggggtcttaatgtggctctggagtggaagccaccccaggatgtcggcaacacggagctctgggggtacacagtgcagaaagccgacaagaagaccatggagtggttcaccgtcttggagcattaccgccgcacccactgcgtggtgccagagctcatcattggcaatggctactacttccgcgtcttcagccagaatatggttggctttagtgacagagcggccaccaccaaggagcccgtctttatccccagaccaggcatcacctatgagccacccaactataaggccctggacttctccgaggccccaagcttcacccagcccctggtgaaccgctcggtcatcgcgggctacactgctatgctctgctgtgctgtccggggtagccccaagcccaagatttcctggttcaagaatggcctggacctgggagaagacgcccgcttccgcatgttcagcaagcagggagtgttgactctggagattagaaagccctgcccctttgacgggggcatctatgtctgcagggccaccaacttacagggcgaggcacggtgtgagtgccgcctggaggtgcgagtgcctcagtgacctcgagccaataaaggatcgtttattttcattggaagcgtgtgttggttttttgatcaggcgcgtccaagctt

SEQ ID NO: 25 - DNA, 4874 bp, synthetic construct
  source 1..4874: mol_type = other DNA
ttggccactccctctctgcgcgctcgctcgctcactgaggccgcccgggcaaagcccgggcgtcgggcgacctttggtcgcccggcctcagtgagcgagcgagcgcgcagagagggagtggccaactccatcactaggggttcctgcggccgcctggaagatgtctttacccccagcatcagttcaagtggagcagcacataactcttgccctctgccttccaagattctggtgctgagacttatggagtgtcttggaggttgccttctgccccccaaccctgctcccagctggccctcccaggcctgggttgctggcctctgctttatcaggattctcaagagggacagctggtttatgttgcatgactgttccctgcatatctgctctggttttaaatagcttatctgagcagctggaggaccacatgggcttatatggcgtggggtacatgttcctgtagccttgtccctggcacctgccaaaatagcagccaacaccccccacccccaccgccatccccctgccccacccgtcccctgtcgcacattcctccctccgcagggctggctcaccaggccccagcccacatgcctgcttaaagccctctccatcctctgcctcacccagtccccgctgagactgagcagacgcctccaggatctgtcggcagctgctgttctgagccaccatgcctgagccggggaagaagccagtctcagcttttagcaagaagccacggtcagtggaagtggccgcaggcagccctgccgtgttcgaggccgagacagagcgggcaggagtgaaggtgcgctggcagcgcggaggcagtgacatcagcgccagcaacaagtacggcctggccacagagggcacacggcatacgctgacagtgcgggaagtgggccctgccgaccagggatcttacgcagtcattgctggctcctccaaggtcaagttcgacctcaaggtcatagaggcaggtaagtactagcagctacaatccagctaccattctgcttttattttatggttgggataaggctggattattctgagtccaagctaggcccttttgctaatcatgttcatacctcttatcttcctcccacagagaaggcagagcccatgctggcccctgcccctgcccctgctgaggccactggagcccctggagaagccccggccccagccgctgagctgggagaaagtgccccaagtcccaaagggtcaagctcagcagctctcaatggtcctacccctggagcccccgatgaccccattggcctcttcgtgatgcggccacaggatggcgaggtgaccgtgggtggcagcatcaccttctcagcccgcgtggccggcgccagcctcctgaagccgcctgtggtcaagtggttcaagggcaaatgggtggacctgagcagcaaggtgggccagcacctgcagctgcacgacagctacgaccgcgccagcaaggtctatctgttcgagctgcacatcaccgatgcccagcctgccttcactggcagctaccgctgtgaggtgtccaccaaggacaaatttgactgctccaacttcaatctcactgtccacgaggccatgggcaccggagacctggacctcctatcagccttccgccgcacgagcctggctggaggtggtcggcggatcagtgatagccatgaggacactgggattctggacttcagctcactgctgaaaaagagagacagtttccggaccccgagggactcgaagctggaggcaccagcagaggaggacgtgtgggagatcctacggcaggcacccccatctgagtacgagcgcatcgccttccagtacggcgtcactgacctgcgcggcatgctaaagaggctcaagggcatgaggcgcgatgagaagaagagcacagcctttcagaagaagctggagccggcctaccaggtgagcaaaggccacaagatccggctgaccgtggaactggctgaccatgacgctgaggtcaaatggctcaagaatggccaggagatccagatgagcggcagcaagtacatctttgagtccatcggtgccaagcgtaccctgaccatcagccagtgctcattggcggacgacgcagcctaccagtgcgtggtgggtggcgagaagtgtagcacggagctctttgtgaaagagccccctgtgctcatcacgcgccccttggaggaccagctggtgatggtggggcagcgggtggagtttgagtgtgaagtatcggaggagggggcgcaagtcaaatggctgaaggacggggtggagctgacccgggaggagaccttcaaataccggttcaagaaggacgggcagagacaccacctgatcatcaacgaggccatgctggaggacgcggggcactatgcactgtgcactagcgggggccaggcgctggctgagctcattgtgcaggaaaagaagctggaggtgtaccagagcatcgcagacctgatggtgggcgcaaaggaccaggcggtgttcaaatgtgaggtctcagatgagaatgttcggggtgtgtggctgaagaatgggaaggagctggtgcccgacagccgcataaaggtgtcccacatcgggcgggtccacaaactgaccattgacgacgtcacacctgccgacgaggctgactacagctttgtgcccgagggcttcgcctgcaacctgtcagccaagctccacttcatggaggtcaagattgacttcgtacccaggcaggaacctcccaagatccacctggactgcccaggccgcataccagacaccattgtggttgtagctggaaataagctacgtctggacgtccctatctctggggaccctgctcccactgtgatctggcagaaggctatcacgcaggggaataaggccccagccaggccagccccagatgccccagaggacacaggtgacagcgatgagtgggtgtttgacaagaagctgctgtgtgagaccgagggccgggtccgcgtggagaccaccaaggaccgcagcatcttcacggtcgagggggcagagaaggaagatgagggcgtctacacggtcacagtgaagaaccctgtgggcgaggaccaggtcaacctcacagtcaaggtcatcgacgtgccagacgcacctgcggcccccaagatcagcaacgtgggagaggactcctgcacagtacagtgggagccgcctgcctacgatggcgggcagcccatcctgggctacatcctggagcgcaagaagaagaagagctaccggtggatgcggctgaacttcgacctgattcaggagctgagtcatgaagcgcggcgcatgatcgagggcgtggtgtacgagatgcgcgtctacgcggtcaacgccatcggcatgtccaggcccagccctgcctcccagcccttcatgcctatcggtccccccagcgaacccacccacctggcagtagaggacgtctctgacaccacggtctccctcaagtggcggcccccagagcgcgtgggagcaggaggcctggatggctacagcgtggagtactgcccagagggctgctcagagtgggtggctgccctgcaggggctgacagagcacacatcgatactggtgaaggacctgcccacgggggcccggctgcttttccgagtgcgggcacacaatatggcagggcctggagcccctgttaccaccacggagccggtgacagtgcaggagatcctgcaacggccacggcttcagctgcccaggcacctgcgccagaccattcagaagaaggtcggggagcctgtgaaccttctcatccctttccagggcaagccccggcctcaggtgacctggaccaaagaggggcagcccctggcaggcgaggaggtgagcatccgcaacagccccacagacaccatcctgttcatccgggccgctcgccgcgtgcattcaggcacttaccaggtgacggtgcgcattgagaacatggaggacaaggccacgctggtgctgcaggttgttgacaagccaagtcctccccaggatctccgggtgactgacgcctggggtcttaatgtggctctggagtggaagccaccccaggatgtcggcaacacggagctctgggggtacacagtgcagaaagccgacaagaagaccatggagtggttcaccgtcttggagcattaccgccgcacccactgcgtggtgccagagctcatcattggcaatggctactacttccgcgtcttcagccagaatatggttggctttagtgacagagcggccaccaccaaggagcccgtctttatccccagaccaggcatcacctatgagccacccaactataaggccctggacttctccgaggccccaagcttcacccagcccctggtgaaccgctcggtcatcgcgggctacactgctatgctctgctgtgctgtccggggtagccccaagcccaagatttcctggttcaagaatggcctggacctgggagaagacgcccgcttccgcatgttcagcaagcagggagtgttgactctggagattagaaagccctgcccctttgacgggggcatctatgtctgcagggccaccaacttacagggcgaggcacggtgtgagtgccgcctggaggtgcgagtgcctcagtgacctcgagccaataaaggatcgtttattttcattggaagcgtgtgttggttttttgatcaggcgcgtccaagcttgcggccgcaggaacccctagtgatggagttggccactccctctctgcgcgctcgctcgctcactgaggccgggcgaccaaaggtcgcccgacgcccgggctttgcccgggcggcctcagtgagcgagcgagcgcgcagagagggagtggccaa

SEQ ID NO: 26 - DNA, 4844 bp, synthetic construct
  source 1..4844: mol_type = other DNA
ctgcgcgctcgctcgctcactgaggccgcccgggcaaagcccgggcgtcgggcgacctttggtcgcccggcctcagtgagcgagcgagcgcgcagagagggagtggccaactccatcactaggggttcctgcggccgcctggaagatgtctttacccccagcatcagttcaagtggagcagcacataactcttgccctctgccttccaagattctggtgctgagacttatggagtgtcttggaggttgccttctgccccccaaccctgctcccagctggccctcccaggcctgggttgctggcctctgctttatcaggattctcaagagggacagctggtttatgttgcatgactgttccctgcatatctgctctggttttaaatagcttatctgagcagctggaggaccacatgggcttatatggcgtggggtacatgttcctgtagccttgtccctggcacctgccaaaatagcagccaacaccccccacccccaccgccatccccctgccccacccgtcccctgtcgcacattcctccctccgcagggctggctcaccaggccccagcccacatgcctgcttaaagccctctccatcctctgcctcacccagtccccgctgagactgagcagacgcctccaggatctgtcggcagctgctgttctgagccaccatgcctgagccggggaagaagccagtctcagcttttagcaagaagccacggtcagtggaagtggccgcaggcagccctgccgtgttcgaggccgagacagagcgggcaggagtgaaggtgcgctggcagcgcggaggcagtgacatcagcgccagcaacaagtacggcctggccacagagggcacacggcatacgctgacagtgcgggaagtgggccctgccgaccagggatcttacgcagtcattgctggctcctccaaggtcaagttcgacctcaaggtcatagaggcaggtaagtactagcagctacaatccagctaccattctgcttttattttatggttgggataaggctggattattctgagtccaagctaggcccttttgctaatcatgttcatacctcttatcttcctcccacagagaaggcagagcccatgctggcccctgcccctgcccctgctgaggccactggagcccctggagaagccccggccccagccgctgagctgggagaaagtgccccaagtcccaaagggtcaagctcagcagctctcaatggtcctacccctggagcccccgatgaccccattggcctcttcgtgatgcggccacaggatggcgaggtgaccgtgggtggcagcatcaccttctcagcccgcgtggccggcgccagcctcctgaagccgcctgtggtcaagtggttcaagggcaaatgggtggacctgagcagcaaggtgggccagcacctgcagctgcacgacagctacgaccgcgccagcaaggtctatctgttcgagctgcacatcaccgatgcccagcctgccttcactggcagctaccgctgtgaggtgtccaccaaggacaaatttgactgctccaacttcaatctcactgtccacgaggccatgggcaccggagacctggacctcctatcagccttccgccgcacgagcctggctggaggtggtcggcggatcagtgatagccatgaggacactgggattctggacttcagctcactgctgaaaaagagagacagtttccggaccccgagggactcgaagctggaggcaccagcagaggaggacgtgtgggagatcctacggcaggcacccccatctgagtacgagcgcatcgccttccagtacggcgtcactgacctgcgcggcatgctaaagaggctcaagggcatgaggcgcgatgagaagaagagcacagcctttcagaagaagctggagccggcctaccaggtgagcaaaggccacaagatccggctgaccgtggaactggctgaccatgacgctgaggtcaaatggctcaagaatggccaggagatccagatgagcggcagcaagtacatctttgagtccatcggtgccaagcgtaccctgaccatcagccagtgctcattggcggacgacgcagcctaccagtgcgtggtgggtggcgagaagtgtagcacggagctctttgtgaaagagccccctgtgctcatcacgcgccccttggaggaccagctggtgatggtggggcagcgggtggagtttgagtgtgaagtatcggaggagggggcgcaagtcaaatggctgaaggacggggtggagctgacccgggaggagaccttcaaataccggttcaagaaggacgggcagagacaccacctgatcatcaacgaggccatgctggaggacgcggggcactatgcactgtgcactagcgggggccaggcgctggctgagctcattgtgcaggaaaagaagctggaggtgtaccagagcatcgcagacctgatggtgggcgcaaaggaccaggcggtgttcaaatgtgaggtctcagatgagaatgttcggggtgtgtggctgaagaatgggaaggagctggtgcccgacagccgcataaaggtgtcccacatcgggcgggtccacaaactgaccattgacgacgtcacacctgccgacgaggctgactacagctttgtgcccgagggcttcgcctgcaacctgtcagccaagctccacttcatggaggtcaagattgacttcgtacccaggcaggaacctcccaagatccacctggactgcccaggccgcataccagacaccattgtggttgtagctggaaataagctacgtctggacgtccctatctctggggaccctgctcccactgtgatctggcagaaggctatcacgcaggggaataaggccccagccaggccagccccagatgccccagaggacacaggtgacagcgatgagtgggtgtttgacaagaagctgctgtgtgagaccgagggccgggtccgcgtggagaccaccaaggaccgcagcatcttcacggtcgagggggcagagaaggaagatgagggcgtctacacggtcacagtgaagaaccctgtgggcgaggaccaggtcaacctcacagtcaaggtcatcgacgtgccagacgcacctgcggcccccaagatcagcaacgtgggagaggactcctgcacagtacagtgggagccgcctgcctacgatggcgggcagcccatcctgggctacatcctggagcgcaagaagaagaagagctaccggtggatgcggctgaacttcgacctgattcaggagctgagtcatgaagcgcggcgcatgatcgagggcgtggtgtacgagatgcgcgtctacgcggtcaacgccatcggcatgtccaggcccagccctgcctcccagcccttcatgcctatcggtccccccagcgaacccacccacctggcagtagaggacgtctctgacaccacggtctccctcaagtggcggcccccagagcgcgtgggagcaggaggcctggatggctacagcgtggagtactgcccagagggctgctcagagtgggtggctgccctgcaggggctgacagagcacacatcgatactggtgaaggacctgcccacgggggcccggctgcttttccgagtgcgggcacacaatatggcagggcctggagcccctgttaccaccacggagccggtgacagtgcaggagatcctgcaacggccacggcttcagctgcccaggcacctgcgccagaccattcagaagaaggtcggggagcctgtgaaccttctcatccctttccagggcaagccccggcctcaggtgacctggaccaaagaggggcagcccctggcaggcgaggaggtgagcatccgcaacagccccacagacaccatcctgttcatccgggccgctcgccgcgtgcattcaggcacttaccaggtgacggtgcgcattgagaacatggaggacaaggccacgctggtgctgcaggttgttgacaagccaagtcctccccaggatctccgggtgactgacgcctggggtcttaatgtggctctggagtggaagccaccccaggatgtcggcaacacggagctctgggggtacacagtgcagaaagccgacaagaagaccatggagtggttcaccgtcttggagcattaccgccgcacccactgcgtggtgccagagctcatcattggcaatggctactacttccgcgtcttcagccagaatatggttggctttagtgacagagcggccaccaccaaggagcccgtctttatccccagaccaggcatcacctatgagccacccaactataaggccctggacttctccgaggccccaagcttcacccagcccctggtgaaccgctcggtcatcgcgggctacactgctatgctctgctgtgctgtccggggtagccccaagcccaagatttcctggttcaagaatggcctggacctgggagaagacgcccgcttccgcatgttcagcaagcagggagtgttgactctggagattagaaagccctgcccctttgacgggggcatctatgtctgcagggccaccaacttacagggcgaggcacggtgtgagtgccgcctggaggtgcgagtgcctcagtgacctcgagccaataaaggatcgtttattttcattggaagcgtgtgttggttttttgatcaggcgcgtccaagcttgcggccgcaggaacccctagtgatggagttggccactccctctctgcgcgctcgctcgctcactgaggccgggcgaccaaaggtcgcccgacgcccgggctttgcccgggcggcctcagtgagcgagcgagcgcgcag

SEQ ID NO: 27 - DNA, 4640 bp, synthetic construct
  source 1..4640: mol_type = other DNA
ctcagtccattaggagccagtagcctggaagatgtctttacccccagcatcagttcaagtggagcagcacataactcttgccctctgccttccaagattctggtgctgagacttatggagtgtcttggaggttgccttctgccccccaaccctgctcccagctggccctcccaggcctgggttgctggcctctgctttatcaggattctcaagagggacagctggtttatgttgcatgactgttccctgcatatctgctctggttttaaatagcttatctgagcagctggaggaccacatgggcttatatggcgtggggtacatgttcctgtagccttgtccctggcacctgccaaaatagcagccaacaccccccacccccaccgccatccccctgccccacccgtcccctgtcgcacattcctccctccgcagggctggctcaccaggccccagcccacatgcctgcttaaagccctctccatcctctgcctcacccagtccccgctgagactgagcagacgcctccaggatctgtcggcagggtttagtgaaccgtcagatcctgcagaagttggtcgtgaggcactagtgggcaggtaagtatcaaggttacaagacaggtttaaggagaccaatagaaactgggcttgtcgagacagagaagactcttgcgtttctgataggcacctattggtcttactgacatccactttgcctttctctccacaggtgtactagtccgccaccatgcctgagcctggaaagaaacctgtgtccgccttcagcaagaagcccagatccgttgaagtggccgctggaagccctgccgtgtttgaggccgaaacagaacgcgctggcgtgaaagttcgatggcagagaggcggcagcgatatcagcgccagcaacaaatatggcctggccaccgagggcaccagacacacactgacagtcagagaagtgggccctgccgatcagggctcttatgccgtgattgccggcagcagcaaagtgaagttcgacctgaaagtgatcgaggccgagaaggccgagcctatgcttgctcctgctccagctcctgctgaagctacaggtgctcctggcgaagctccagcaccagctgctgaactgggagagtctgccccatctcctaagggctctagcagcgccgctctgaatggacctacacctggcgctcccgatgatcccatcggcctgtttgttatgaggccccaggatggcgaagtgacagtcggcggcagcatcacctttagcgctagagttgcaggcgccagcctgctgaaacctcctgtggtcaagtggttcaaaggcaaatgggtcgacctgtcctccaaagtgggccagcatctgcagctccacgacagctacgatagagccagcaaggtgtacctgttcgagctgcacatcacagacgcccagccagcctttaccggcagctacagatgtgaagtgtccaccaaggacaagttcgactgcagcaacttcaacctgaccgtgcacgaggccatgggcacaggcgatctggatctgctgagcgcctttcggagaacatctctggctggcggcggaagaagaatcagcgacagccacgaggataccggcatcctggatttcagcagcctgctcaagaagcgggacagcttcagaacccctcgggacagcaaactggaagctcccgccgaggaagatgtctgggagatcctgagacaggcccctcctagcgagtacgagagaatcgcctttcagtacggcgtgaccgacctgagaggcatgctgaagaggctgaagggcatgcgccgggacgagaagaagtccacagccttccagaagaagctggaacccgcctaccaggtgtccaagggccacaagatcagactgaccgtggaactggccgaccacgacgccgaagtgaagtggctgaaaaacggccaagagattcagatgagcggcagcaagtacatcttcgagagcatcggcgccaagcggaccctgacaatcagccagtgtagcctggccgatgacgccgcctatcagtgtgttgttggcggcgagaagtgcagcaccgagctgttcgtgaaagaacctccagtgctgatcacccggcctctggaagatcagctggtcatggtcggacagcgcgtggaattcgagtgcgaggtttccgaagagggcgcccaagtcaaatggctgaaggatggcgtcgagctgaccagagaggaaaccttcaagtaccggttcaagaaggacggccagcggcaccacctgatcatcaatgaagccatgctggaagatgccggccactacgccttgtgtacatctggtggacaggccctggccgagctgattgtgcaagagaagaaactcgaggtgtaccagtctatcgccgacctgatggtcggagccaaagaccaggccgtgttcaagtgcgaagtgtccgacgagaatgtgcgcggcgtgtggctcaagaacggcaaagaactggtgcccgacagccggatcaaggtgtcccacattggcagagtgcacaagctgaccatcgacgacgtgacccctgctgacgaggccgattacagctttgtgcctgagggcttcgcctgtaacctgagcgccaagctgcactttatggaagtcaagatcgacttcgtgccccggcaagagcctcctaagatccacctggattgccctggcagaatccccgacacaatcgtggtggtggccggaaacaagctgagactggatgtgcccatcagcggcgatcctgctcctacagtgatctggcagaaggccatcacacagggcaacaaggcccctgctagacccgctcctgatgctcctgaagataccggcgatagcgacgagtgggtgttcgacaagaaactgctgtgcgagacagagggaagagtgcgagtggaaaccacaaaggaccgcagcatcttcaccgtggaaggcgccgagaaagaggacgagggcgtctacacagtgaccgtgaagaatcccgtgggcgaagatcaagtgaacctgacagtgaaagtcatcgacgtgcccgacgctcctgccgctccaaagatctctaacgtgggagaagatagctgcaccgtgcagtgggagcctccagcttatgatggcggacagcctatcctgggctacatcctggaacgcaagaagaaaaagtcctaccggtggatgcggctgaacttcgatctgatccaagagctgagccacgaagccagacggatgatcgaaggcgtggtgtacgagatgagagtgtacgccgtgaacgccatcggcatgagcagaccttctccagcctctcagcccttcatgcctatcggccctccaagcgaacctacacacctggccgttgaggacgtgtccgataccaccgtgtctctgaaatggcggcctcctgagagagttggagctggcggactggatggctacagcgtggaatactgtccagagggctgtagcgagtgggttgcagctctgcagggactgaccgagcacacctctatcctggtcaaggacctgcctaccggcgctagactgctgtttagagtgcgggcccacaacatggctggaccaggtgcaccagtgaccaccacagaacccgtgacagtgcaagaaatcctgcagcggccaagactgcagctgcccagacacctgaggcagaccatccagaaaaaagtgggcgagcccgtgaacctgctgatcccatttcaaggcaagcccagacctcaagtgacctggaccaaagagggacagcctctggccggcgaagaggtgtccatcagaaacagccccaccgacaccatcctgttcatcagagccgccagaagggtgcactccggcacctatcaagtgactgtgcggatcgagaacatggaagataaggccacactggtgctgcaggtcgtggacaaacccagtcctcctcaggacctgcgcgtgacagatgcctggggactgaatgtggctctggaatggaagcctccacaggacgtgggcaacacagagctgtggggctataccgtgcagaaagccgacaaaaagaccatggaatggttcaccgtgctggaacactaccggcggacccattgtgtggtgcctgagctgatcatcggcaacggctactacttccgggtgttcagccagaatatggtcggattcagcgatagggccgccaccacaaaagaaccagtgttcatccccagacctggcatcacctacgagcctccaaactacaaggccctggacttcagcgaggcccctagctttacacagcccctggtcaacagaagcgtgatcgccggctacaccgccatgctgtgttgtgccgttagaggcagccccaagcctaagatctcctggtttaagaacggcctggacctcggcgaggacgccagattcagaatgttcagcaagcagggcgtgctgaccctggaaatcagaaagccctgtcctttcgacggcggcatctacgtgtgcagagccaccaatctgcagggcgaagctagatgcgagtgcagactggaagttcgggtgccccagtaagcggccgccaataaaggatcgtttattttcattggaagcgtgtgttggttttttgatcaggcgcg

SEQ ID NO: 28 - DNA, 4980 bp, synthetic construct
  source 1..4980: mol_type = other DNA
ttggccactccctctctgcgcgctcgctcgctcactgaggccgcccgggcaaagcccgggcgtcgggcgacctttggtcgcccggcctcagtgagcgagcgagcgcgcagagagggagtggccaactccatcactaggggttcctgcggccgcacgcgtctcagtccattaggagccagtagcctggaagatgtctttacccccagcatcagttcaagtggagcagcacataactcttgccctctgccttccaagattctggtgctgagacttatggagtgtcttggaggttgccttctgccccccaaccctgctcccagctggccctcccaggcctgggttgctggcctctgctttatcaggattctcaagagggacagctggtttatgttgcatgactgttccctgcatatctgctctggttttaaatagcttatctgagcagctggaggaccacatgggcttatatggcgtggggtacatgttcctgtagccttgtccctggcacctgccaaaatagcagccaacaccccccacccccaccgccatccccctgccccacccgtcccctgtcgcacattcctccctccgcagggctggctcaccaggccccagcccacatgcctgcttaaagccctctccatcctctgcctcacccagtccccgctgagactgagcagacgcctccaggatctgtcggcagggtttagtgaaccgtcagatcctgcagaagttggtcgtgaggcactagtgggcaggtaagtatcaaggttacaagacaggtttaaggagaccaatagaaactgggcttgtcgagacagagaagactcttgcgtttctgataggcacctattggtcttactgacatccactttgcctttctctccacaggtgtactagtccgccaccatgcctgagcctggaaagaaacctgtgtccgccttcagcaagaagcccagatccgttgaagtggccgctggaagccctgccgtgtttgaggccgaaacagaacgcgctggcgtgaaagttcgatggcagagaggcggcagcgatatcagcgccagcaacaaatatggcctggccaccgagggcaccagacacacactgacagtcagagaagtgggccctgccgatcagggctcttatgccgtgattgccggcagcagcaaagtgaagttcgacctgaaagtgatcgaggccgagaaggccgagcctatgcttgctcctgctccagctcctgctgaagctacaggtgctcctggcgaagctccagcaccagctgctgaactgggagagtctgccccatctcctaagggctctagcagcgccgctctgaatggacctacacctggcgctcccgatgatcccatcggcctgtttgttatgaggccccaggatggcgaagtgacagtcggcggcagcatcacctttagcgctagagttgcaggcgccagcctgctgaaacctcctgtggtcaagtggttcaaaggcaaatgggtcgacctgtcctccaaagtgggccagcatctgcagctccacgacagctacgatagagccagcaaggtgtacctgttcgagctgcacatcacagacgcccagccagcctttaccggcagctacagatgtgaagtgtccaccaaggacaagttcgactgcagcaacttcaacctgaccgtgcacgaggccatgggcacaggcgatctggatctgctgagcgcctttcggagaacatctctggctggcggcggaagaagaatcagcgacagccacgaggataccggcatcctggatttcagcagcctgctcaagaagcgggacagcttcagaacccctcgggacagcaaactggaagctcccgccgaggaagatgtctgggagatcctgagacaggcccctcctagcgagtacgagagaatcgcctttcagtacggcgtgaccgacctgagaggcatgctgaagaggctgaagggcatgcgccgggacgagaagaagtccacagccttccagaagaagctggaacccgcctaccaggtgtccaagggccacaagatcagactgaccgtggaactggccgaccacgacgccgaagtgaagtggctgaaaaacggccaagagattcagatgagcggcagcaagtacatcttcgagagcatcggcgccaagcggaccctgacaatcagccagtgtagcctggccgatgacgccgcctatcagtgtgttgttggcggcgagaagtgcagcaccgagctgttcgtgaaagaacctccagtgctgatcacccggcctctggaagatcagctggtcatggtcggacagcgcgtggaattcgagtgcgaggtttccgaagagggcgcccaagtcaaatggctgaaggatggcgtcgagctgaccagagaggaaaccttcaagtaccggttcaagaaggacggccagcggcaccacctgatcatcaatgaagccatgctggaagatgccggccactacgccttgtgtacatctggtggacaggccctggccgagctgattgtgcaagagaagaaactcgaggtgtaccagtctatcgccgacctgatggtcggagccaaagaccaggccgtgttcaagtgcgaagtgtccgacgagaatgtgcgcggcgtgtggctcaagaacggcaaagaactggtgcccgacagccggatcaaggtgtcccacattggcagagtgcacaagctgaccatcgacgacgtgacccctgctgacgaggccgattacagctttgtgcctgagggcttcgcctgtaacctgagcgccaagctgcactttatggaagtcaagatcgacttcgtgccccggcaagagcctcctaagatccacctggattgccctggcagaatccccgacacaatcgtggtggtggccggaaacaagctgagactggatgtgcccatcagcggcgatcctgctcctacagtgatctggcagaaggccatcacacagggcaacaaggcccctgctagacccgctcctgatgctcctgaagataccggcgatagcgacgagtgggtgttcgacaagaaactgctgtgcgagacagagggaagagtgcgagtggaaaccacaaaggaccgcagcatcttcaccgtggaaggcgccgagaaagaggacgagggcgtctacacagtgaccgtgaagaatcccgtgggcgaagatcaagtgaacctgacagtgaaagtcatcgacgtgcccgacgctcctgccgctccaaagatctctaacgtgggagaagatagctgcaccgtgcagtgggagcctccagcttatgatggcggacagcctatcctgggctacatcctggaacgcaagaagaaaaagtcctaccggtggatgcggctgaacttcgatctgatccaagagctgagccacgaagccagacggatgatcgaaggcgtggtgtacgagatgagagtgtacgccgtgaacgccatcggcatgagcagaccttctccagcctctcagcccttcatgcctatcggccctccaagcgaacctacacacctggccgttgaggacgtgtccgataccaccgtgtctctgaaatggcggcctcctgagagagttggagctggcggactggatggctacagcgtggaatactgtccagagggctgtagcgagtgggttgcagctctgcagggactgaccgagcacacctctatcctggtcaaggacctgcctaccggcgctagactgctgtttagagtgcgggcccacaacatggctggaccaggtgcaccagtgaccaccacagaacccgtgacagtgcaagaaatcctgcagcggccaagactgcagctgcccagacacctgaggcagaccatccagaaaaaagtgggcgagcccgtgaacctgctgatcccatttcaaggcaagcccagacctcaagtgacctggaccaaagagggacagcctctggccggcgaagaggtgtccatcagaaacagccccaccgacaccatcctgttcatcagagccgccagaagggtgcactccggcacctatcaagtgactgtgcggatcgagaacatggaagataaggccacactggtgctgcaggtcgtggacaaacccagtcctcctcaggacctgcgcgtgacagatgcctggggactgaatgtggctctggaatggaagcctccacaggacgtgggcaacacagagctgtggggctataccgtgcagaaagccgacaaaaagaccatggaatggttcaccgtgctggaacactaccggcggacccattgtgtggtgcctgagctgatcatcggcaacggctactacttccgggtgttcagccagaatatggtcggattcagcgatagggccgccaccacaaaagaaccagtgttcatccccagacctggcatcacctacgagcctccaaactacaaggccctggacttcagcgaggcccctagctttacacagcccctggtcaacagaagcgtgatcgccggctacaccgccatgctgtgttgtgccgttagaggcagccccaagcctaagatctcctggtttaagaacggcctggacctcggcgaggacgccagattcagaatgttcagcaagcagggcgtgctgaccctggaaatcagaaagccctgtcctttcgacggcggcatctacgtgtgcagagccaccaatctgcagggcgaagctagatgcgagtgcagactggaagttcgggtgccccagtaagcggccgccaataaaggatcgtttattttcattggaagcgtgtgttggttttttgatcaggcgcgtccaagcttgcatgctggggagagatctgcggccgcaggaacccctagtgatggagttggccactccctctctgcgcgctcgctcgctcactgaggccgggcgaccaaaggtcgcccgacgcccgggctttgcccgggcggcctcagtgagcgagcgagcgcgcagagagggagtggccaa

SEQ ID NO: 29 - DNA, 4950 bp, synthetic construct
  source 1..4950: mol_type = other DNA
ctgcgcgctcgctcgctcactgaggccgcccgggcaaagcccgggcgtcgggcgacctttggtcgcccggcctcagtgagcgagcgagcgcgcagagagggagtggccaactccatcactaggggttcctgcggccgcacgcgtctcagtccattaggagccagtagcctggaagatgtctttacccccagcatcagttcaagtggagcagcacataactcttgccctctgccttccaagattctggtgctgagacttatggagtgtcttggaggttgccttctgccccccaaccctgctcccagctggccctcccaggcctgggttgctggcctctgctttatcaggattctcaagagggacagctggtttatgttgcatgactgttccctgcatatctgctctggttttaaatagcttatctgagcagctggaggaccacatgggcttatatggcgtggggtacatgttcctgtagccttgtccctggcacctgccaaaatagcagccaacaccccccacccccaccgccatccccctgccccacccgtcccctgtcgcacattcctccctccgcagggctggctcaccaggccccagcccacatgcctgcttaaagccctctccatcctctgcctcacccagtccccgctgagactgagcagacgcctccaggatctgtcggcagggtttagtgaaccgtcagatcctgcagaagttggtcgtgaggcactagtgggcaggtaagtatcaaggttacaagacaggtttaaggagaccaatagaaactgggcttgtcgagacagagaagactcttgcgtttctgataggcacctattggtcttactgacatccactttgcctttctctccacaggtgtactagtccgccaccatgcctgagcctggaaagaaacctgtgtccgccttcagcaagaagcccagatccgttgaagtggccgctggaagccctgccgtgtttgaggccgaaacagaacgcgctggcgtgaaagttcgatggcagagaggcggcagcgatatcagcgccagcaacaaatatggcctggccaccgagggcaccagacacacactgacagtcagagaagtgggccctgccgatcagggctcttatgccgtgattgccggcagcagcaaagtgaagttcgacctgaaagtgatcgaggccgagaaggccgagcctatgcttgctcctgctccagctcctgctgaagctacaggtgctcctggcgaagctccagcaccagctgctgaactgggagagtctgccccatctcctaagggctctagcagcgccgctctgaatggacctacacctggcgctcccgatgatcccatcggcctgtttgttatgaggccccaggatggcgaagtgacagtcggcggcagcatcacctttagcgctagagttgcaggcgccagcctgctgaaacctcctgtggtcaagtggttcaaaggcaaatgggtcgacctgtcctccaaagtgggccagcatctgcagctccacgacagctacgatagagccagcaaggtgtacctgttcgagctgcacatcacagacgcccagccagcctttaccggcagctacagatgtgaagtgtccaccaaggacaagttcgactgcagcaacttcaacctgaccgtgcacgaggccatgggcacaggcgatctggatctgctgagcgcctttcggagaacatctctggctggcggcggaagaagaatcagcgacagccacgaggataccggcatcctggatttcagcagcctgctcaagaagcgggacagcttcagaacccctcgggacagcaaactggaagctcccgccgaggaagatgtctgggagatcctgagacaggcccctcctagcgagtacgagagaatcgcctttcagtacggcgtgaccgacctgagaggcatgctgaagaggctgaagggcatgcgccgggacgagaagaagtccacagccttccagaagaagctggaacccgcctaccaggtgtccaagggccacaagatcagactgaccgtggaactggccgaccacgacgccgaagtgaagtggctgaaaaacggccaagagattcagatgagcggcagcaagtacatcttcgagagcatcggcgccaagcggaccctgacaatcagccagtgtagcctggccgatgacgccgcctatcagtgtgttgttggcggcgagaagtgcagcaccgagctgttcgtgaaagaacctccagtgctgatcacccggcctctggaagatcagctggtcatggtcggacagcgcgtggaattcgagtgcgaggtttccgaagagggcgcccaagtcaaatggctgaaggatggcgtcgagctgaccagagaggaaaccttcaagtaccggttcaagaaggacggccagcggcaccacctgatcatcaatgaagccatgctggaagatgccggccactacgccttgtgtacatctggtggacaggccctggccgagctgattgtgcaagagaagaaactcgaggtgtaccagtctatcgccgacctgatggtcggagccaaagaccaggccgtgttcaagtgcgaagtgtccgacgagaatgtgcgcggcgtgtggctcaagaacggcaaagaactggtgcccgacagccggatcaaggtgtcccacattggcagagtgcacaagctgaccatcgacgacgtgacccctgctgacgaggccgattacagctttgtgcctgagggcttcgcctgtaacctgagcgccaagctgcactttatggaagtcaagatcgacttcgtgccccggcaagagcctcctaagatccacctggattgccctggcagaatccccgacacaatcgtggtggtggccggaaacaagctgagactggatgtgcccatcagcggcgatcctgctcctacagtgatctggcagaaggccatcacacagggcaacaaggcccctgctagacccgctcctgatgctcctgaagataccggcgatagcgacgagtgggtgttcgacaagaaactgctgtgcgagacagagggaagagtgcgagtggaaaccacaaaggaccgcagcatcttcaccgtggaaggcgccgagaaagaggacgagggcgtctacacagtgaccgtgaagaatcccgtgggcgaagatcaagtgaacctgacagtgaaagtcatcgacgtgcccgacgctcctgccgctccaaagatctctaacgtgggagaagatagctgcaccgtgcagtgggagcctccagcttatgatggcggacagcctatcctgggctacatcctggaacgcaagaagaaaaagtcctaccggtggatgcggctgaacttcgatctgatccaagagctgagccacgaagccagacggatgatcgaaggcgtggtgtacgagatgagagtgtacgccgtgaacgccatcggcatgagcagaccttctccagcctctcagcccttcatgcctatcggccctccaagcgaacctacacacctggccgttgaggacgtgtccgataccaccgtgtctctgaaatggcggcctcctgagagagttggagctggcggactggatggctacagcgtggaatactgtccagagggctgtagcgagtgggttgcagctctgcagggactgaccgagcacacctctatcctggtcaaggacctgcctaccggcgctagactgctgtttagagtgcgggcccacaacatggctggaccaggtgcaccagtgaccaccacagaacccgtgacagtgcaagaaatcctgcagcggccaagactgcagctgcccagacacctgaggcagaccatccagaaaaaagtgggcgagcccgtgaacctgctgatcccatttcaaggcaagcccagacctcaagtgacctggaccaaagagggacagcctctggccggcgaagaggtgtccatcagaaacagccccaccgacaccatcctgttcatcagagccgccagaagggtgcactccggcacctatcaagtgactgtgcggatcgagaacatggaagataaggccacactggtgctgcaggtcgtggacaaacccagtcctcctcaggacctgcgcgtgacagatgcctggggactgaatgtggctctggaatggaagcctccacaggacgtgggcaacacagagctgtggggctataccgtgcagaaagccgacaaaaagaccatggaatggttcaccgtgctggaacactaccggcggacccattgtgtggtgcctgagctgatcatcggcaacggctactacttccgggtgttcagccagaatatggtcggattcagcgatagggccgccaccacaaaagaaccagtgttcatccccagacctggcatcacctacgagcctccaaactacaaggccctggacttcagcgaggcccctagctttacacagcccctggtcaacagaagcgtgatcgccggctacaccgccatgctgtgttgtgccgttagaggcagccccaagcctaagatctcctggtttaagaacggcctggacctcggcgaggacgccagattcagaatgttcagcaagcagggcgtgctgaccctggaaatcagaaagccctgtcctttcgacggcggcatctacgtgtgcagagccaccaatctgcagggcgaagctagatgcgagtgcagactggaagttcgggtgccccagtaagcggccgccaataaaggatcgtttattttcattggaagcgtgtgttggttttttgatcaggcgcgtccaagcttgcatgctggggagagatctgcggccgcaggaacccctagtgatggagttggccactccctctctgcgcgctcgctcgctcactgaggccgggcgaccaaaggtcgcccgacgcccgggctttgcccgggcggcctcagtgagcgagcgagcgcgcag

SEQ ID NO: 30 - DNA, 4491 bp, synthetic construct
  source 1..4491: mol_type = other DNA
ctcagtccattaggagccagtagcctggaagatgtctttacccccagcatcagttcaagtggagcagcacataactcttgccctctgccttccaagattctggtgctgagacttatggagtgtcttggaggttgccttctgccccccaaccctgctcccagctggccctcccaggcctgggttgctggcctctgctttatcaggattctcaagagggacagctggtttatgttgcatgactgttccctgcatatctgctctggttttaaatagcttatctgagcagctggaggaccacatgggcttatatggcgtggggtacatgttcctgtagccttgtccctggcacctgccaaaatagcagccaacaccccccacccccaccgccatccccctgccccacccgtcccctgtcgcacattcctccctccgcagggctggctcaccaggccccagcccacatgcctgcttaaagccctctccatcctctgcctcacccagtccccgctgagactgagcagacgcctccaggatctgtcggcagggtttagtgaaccgtcagatcctgcagaagttggtcgtgaggcactagtccgccaccatgcctgagcctggaaagaaacctgtgtccgccttcagcaagaagcccagatccgttgaagtggccgctggaagccctgccgtgtttgaggccgaaacagaacgcgctggcgtgaaagttcgatggcagagaggcggcagcgatatcagcgccagcaacaaatatggcctggccaccgagggcaccagacacacactgacagtcagagaagtgggccctgccgatcagggctcttatgccgtgattgccggcagcagcaaagtgaagttcgacctgaaagtgatcgaggccgagaaggccgagcctatgcttgctcctgctccagctcctgctgaagctacaggtgctcctggcgaagctccagcaccagctgctgaactgggagagtctgccccatctcctaagggctctagcagcgccgctctgaatggacctacacctggcgctcccgatgatcccatcggcctgtttgttatgaggccccaggatggcgaagtgacagtcggcggcagcatcacctttagcgctagagttgcaggcgccagcctgctgaaacctcctgtggtcaagtggttcaaaggcaaatgggtcgacctgtcctccaaagtgggccagcatctgcagctccacgacagctacgatagagccagcaaggtgtacctgttcgagctgcacatcacagacgcccagccagcctttaccggcagctacagatgtgaagtgtccaccaaggacaagttcgactgcagcaacttcaacctgaccgtgcacgaggccatgggcacaggcgatctggatctgctgagcgcctttcggagaacatctctggctggcggcggaagaagaatcagcgacagccacgaggataccggcatcctggatttcagcagcctgctcaagaagcgggacagcttcagaacccctcgggacagcaaactggaagctcccgccgaggaagatgtctgggagatcctgagacaggcccctcctagcgagtacgagagaatcgcctttcagtacggcgtgaccgacctgagaggcatgctgaagaggctgaagggcatgcgccgggacgagaagaagtccacagccttccagaagaagctggaacccgcctaccaggtgtccaagggccacaagatcagactgaccgtggaactggccgaccacgacgccgaagtgaagtggctgaaaaacggccaagagattcagatgagcggcagcaagtacatcttcgagagcatcggcgccaagcggaccctgacaatcagccagtgtagcctggccgatgacgccgcctatcagtgtgttgttggcggcgagaagtgcagcaccgagctgttcgtgaaagaacctccagtgctgatcacccggcctctggaagatcagctggtcatggtcggacagcgcgtggaattcgagtgcgaggtttccgaagagggcgcccaagtcaaatggctgaaggatggcgtcgagctgaccagagaggaaaccttcaagtaccggttcaagaaggacggccagcggcaccacctgatcatcaatgaagccatgctggaagatgccggccactacgccttgtgtacatctggtggacaggccctggccgagctgattgtgcaagagaagaaactcgaggtgtaccagtctatcgccgacctgatggtcggagccaaagaccaggccgtgttcaagtgcgaagtgtccgacgagaatgtgcgcggcgtgtggctcaagaacggcaaagaactggtgcccgacagccggatcaaggtgtcccacattggcagagtgcacaagctgaccatcgacgacgtgacccctgctgacgaggccgattacagctttgtgcctgagggcttcgcctgtaacctgagcgccaagctgcactttatggaagtcaagatcgacttcgtgccccggcaagagcctcctaagatccacctggattgccctggcagaatccccgacacaatcgtggtggtggccggaaacaagctgagactggatgtgcccatcagcggcgatcctgctcctacagtgatctggcagaaggccatcacacagggcaacaaggcccctgctagacccgctcctgatgctcctgaagataccggcgatagcgacgagtgggtgttcgacaagaaactgctgtgcgagacagagggaagagtgcgagtggaaaccacaaaggaccgcagcatcttcaccgtggaaggcgccgagaaagaggacgagggcgtctacacagtgaccgtgaagaatcccgtgggcgaagatcaagtgaacctgacagtgaaagtcatcgacgtgcccgacgctcctgccgctccaaagatctctaacgtgggagaagatagctgcaccgtgcagtgggagcctccagcttatgatggcggacagcctatcctgggctacatcctggaacgcaagaagaaaaagtcctaccggtggatgcggctgaacttcgatctgatccaagagctgagccacgaagccagacggatgatcgaaggcgtggtgtacgagatgagagtgtacgccgtgaacgccatcggcatgagcagaccttctccagcctctcagcccttcatgcctatcggccctccaagcgaacctacacacctggccgttgaggacgtgtccgataccaccgtgtctctgaaatggcggcctcctgagagagttggagctggcggactggatggctacagcgtggaatactgtccagagggctgtagcgagtgggttgcagctctgcagggactgaccgagcacacctctatcctggtcaaggacctgcctaccggcgctagactgctgtttagagtgcgggcccacaacatggctggaccaggtgcaccagtgaccaccacagaacccgtgacagtgcaagaaatcctgcagcggccaagactgcagctgcccagacacctgaggcagaccatccagaaaaaagtgggcgagcccgtgaacctgctgatcccatttcaaggcaagcccagacctcaagtgacctggaccaaagagggacagcctctggccggcgaagaggtgtccatcagaaacagccccaccgacaccatcctgttcatcagagccgccagaagggtgcactccggcacctatcaagtgactgtgcggatcgagaacatggaagataaggccacactggtgctgcaggtcgtggacaaacccagtcctcctcaggacctgcgcgtgacagatgcctggggactgaatgtggctctggaatggaagcctccacaggacgtgggcaacacagagctgtggggctataccgtgcagaaagccgacaaaaagaccatggaatggttcaccgtgctggaacactaccggcggacccattgtgtggtgcctgagctgatcatcggcaacggctactacttccgggtgttcagccagaatatggtcggattcagcgatagggccgccaccacaaaagaaccagtgttcatccccagacctggcatcacctacgagcctccaaactacaaggccctggacttcagcgaggcccctagctttacacagcccctggtcaacagaagcgtgatcgccggctacaccgccatgctgtgttgtgccgttagaggcagccccaagcctaagatctcctggtttaagaacggcctggacctcggcgaggacgccagattcagaatgttcagcaagcagggcgtgctgaccctggaaatcagaaagccctgtcctttcgacggcggcatctacgtgtgcagagccaccaatctgcagggcgaagctagatgcgagtgcagactggaagttcgggtgccccagtaagcggccgccaataaaggatcgtttattttcattggaagcgtgtgttggttttttgatcaggcgcg

SEQ ID NO: 31 - DNA, 4831 bp, synthetic construct
  source 1..4831: mol_type = other DNA
ttggccactccctctctgcgcgctcgctcgctcactgaggccgcccgggcaaagcccgggcgtcgggcgacctttggtcgcccggcctcagtgagcgagcgagcgcgcagagagggagtggccaactccatcactaggggttcctgcggccgcacgcgtctcagtccattaggagccagtagcctggaagatgtctttacccccagcatcagttcaagtggagcagcacataactcttgccctctgccttccaagattctggtgctgagacttatggagtgtcttggaggttgccttctgccccccaaccctgctcccagctggccctcccaggcctgggttgctggcctctgctttatcaggattctcaagagggacagctggtttatgttgcatgactgttccctgcatatctgctctggttttaaatagcttatctgagcagctggaggaccacatgggcttatatggcgtggggtacatgttcctgtagccttgtccctggcacctgccaaaatagcagccaacaccccccacccccaccgccatccccctgccccacccgtcccctgtcgcacattcctccctccgcagggctggctcaccaggccccagcccacatgcctgcttaaagccctctccatcctctgcctcacccagtccccgctgagactgagcagacgcctccaggatctgtcggcagggtttagtgaaccgtcagatcctgcagaagttggtcgtgaggcactagtccgccaccatgcctgagcctggaaagaaacctgtgtccgccttcagcaagaagcccagatccgttgaagtggccgctggaagccctgccgtgtttgaggccgaaacagaacgcgctggcgtgaaagttcgatggcagagaggcggcagcgatatcagcgccagcaacaaatatggcctggccaccgagggcaccagacacacactgacagtcagagaagtgggccctgccgatcagggctcttatgccgtgattgccggcagcagcaaagtgaagttcgacctgaaagtgatcgaggccgagaaggccgagcctatgcttgctcctgctccagctcctgctgaagctacaggtgctcctggcgaagctccagcaccagctgctgaactgggagagtctgccccatctcctaagggctctagcagcgccgctctgaatggacctacacctggcgctcccgatgatcccatcggcctgtttgttatgaggccccaggatggcgaagtgacagtcggcggcagcatcacctttagcgctagagttgcaggcgccagcctgctgaaacctcctgtggtcaagtggttcaaaggcaaatgggtcgacctgtcctccaaagtgggccagcatctgcagctccacgacagctacgatagagccagcaaggtgtacctgttcgagctgcacatcacagacgcccagccagcctttaccggcagctacagatgtgaagtgtccaccaaggacaagttcgactgcagcaacttcaacctgaccgtgcacgaggccatgggcacaggcgatctggatctgctgagcgcctttcggagaacatctctggctggcggcggaagaagaatcagcgacagccacgaggataccggcatcctggatttcagcagcctgctcaagaagcgggacagcttcagaacccctcgggacagcaaactggaagctcccgccgaggaagatgtctgggagatcctgagacaggcccctcctagcgagtacgagagaatcgcctttcagtacggcgtgaccgacctgagaggcatgctgaagaggctgaagggcatgcgccgggacgagaagaagtccacagccttccagaagaagctggaacccgcctaccaggtgtccaagggccacaagatcagactgaccgtggaactggccgaccacgacgccgaagtgaagtggctgaaaaacggccaagagattcagatgagcggcagcaagtacatcttcgagagcatcggcgccaagcggaccctgacaatcagccagtgtagcctggccgatgacgccgcctatcagtgtgttgttggcggcgagaagtgcagcaccgagctgttcgtgaaagaacctccagtgctgatcacccggcctctggaagatcagctggtcatggtcggacagcgcgtggaattcgagtgcgaggtttccgaagagggcgcccaagtcaaatggctgaaggatggcgtcgagctgaccagagaggaaaccttcaagtaccggttcaagaaggacggccagcggcaccacctgatcatcaatgaagccatgctggaagatgccggccactacgccttgtgtacatctggtggacaggccctggccgagctgattgtgcaagagaagaaactcgaggtgtaccagtctatcgccgacctgatggtcggagccaaagaccaggccgtgttcaagtgcgaagtgtccgacgagaatgtgcgcggcgtgtggctcaagaacggcaaagaactggtgcccgacagccggatcaaggtgtcccacattggcagagtgcacaagctgaccatcgacgacgtgacccctgctgacgaggccgattacagctttgtgcctgagggcttcgcctgtaacctgagcgccaagctgcactttatggaagtcaagatcgacttcgtgccccggcaagagcctcctaagatccacctggattgccctggcagaatccccgacacaatcgtggtggtggccggaaacaagctgagactggatgtgcccatcagcggcgatcctgctcctacagtgatctggcagaaggccatcacacagggcaacaaggcccctgctagacccgctcctgatgctcctgaagataccggcgatagcgacgagtgggtgttcgacaagaaactgctgtgcgagacagagggaagagtgcgagtggaaaccacaaaggaccgcagcatcttcaccgtggaaggcgccgagaaagaggacgagggcgtctacacagtgaccgtgaagaatcccgtgggcgaagatcaagtgaacctgacagtgaaagtcatcgacgtgcccgacgctcctgccgctccaaagatctctaacgtgggagaagatagctgcaccgtgcagtgggagcctccagcttatgatggcggacagcctatcctgggctacatcctggaacgcaagaagaaaaagtcctaccggtggatgcggctgaacttcgatctgatccaagagctgagccacgaagccagacggatgatcgaaggcgtggtgtacgagatgagagtgtacgccgtgaacgccatcggcatgagcagaccttctccagcctctcagcccttcatgcctatcggccctccaagcgaacctacacacctggccgttgaggacgtgtccgataccaccgtgtctctgaaatggcggcctcctgagagagttggagctggcggactggatggctacagcgtggaatactgtccagagggctgtagcgagtgggttgcagctctgcagggactgaccgagcacacctctatcctggtcaaggacctgcctaccggcgctagactgctgtttagagtgcgggcccacaacatggctggaccaggtgcaccagtgaccaccacagaacccgtgacagtgcaagaaatcctgcagcggccaagactgcagctgcccagacacctgaggcagaccatccagaaaaaagtgggcgagcccgtgaacctgctgatcccatttcaaggcaagcccagacctcaagtgacctggaccaaagagggacagcctctggccggcgaagaggtgtccatcagaaacagccccaccgacaccatcctgttcatcagagccgccagaagggtgcactccggcacctatcaagtgactgtgcggatcgagaacatggaagataaggccacactggtgctgcaggtcgtggacaaacccagtcctcctcaggacctgcgcgtgacagatgcctggggactgaatgtggctctggaatggaagcctccacaggacgtgggcaacacagagctgtggggctataccgtgcagaaagccgacaaaaagaccatggaatggttcaccgtgctggaacactaccggcggacccattgtgtggtgcctgagctgatcatcggcaacggctactacttccgggtgttcagccagaatatggtcggattcagcgatagggccgccaccacaaaagaaccagtgttcatccccagacctggcatcacctacgagcctccaaactacaaggccctggacttcagcgaggcccctagctttacacagcccctggtcaacagaagcgtgatcgccggctacaccgccatgctgtgttgtgccgttagaggcagccccaagcctaagatctcctggtttaagaacggcctggacctcggcgaggacgccagattcagaatgttcagcaagcagggcgtgctgaccctggaaatcagaaagccctgtcctttcgacggcggcatctacgtgtgcagagccaccaatctgcagggcgaagctagatgcgagtgcagactggaagttcgggtgccccagtaagcggccgccaataaaggatcgtttattttcattggaagcgtgtgttggttttttgatcaggcgcgtccaagcttgcatgctggggagagatctgcggccgcaggaacccctagtgatggagttggccactccctctctgcgcgctcgctcgctcactgaggccgggcgaccaaaggtcgcccgacgcccgggctttgcccgggcggcctcagtgagcgagcgagcgcgcagagagggagtggccaa

SEQ ID NO: 32 - DNA, 4801 bp, synthetic construct
  source 1..4801: mol_type = other DNA
ctgcgcgctcgctcgctcactgaggccgcccgggcaaagcccgggcgtcgggcgacctttggtcgcccggcctcagtgagcgagcgagcgcgcagagagggagtggccaactccatcactaggggttcctgcggccgcacgcgtctcagtccattaggagccagtagcctggaagatgtctttacccccagcatcagttcaagtggagcagcacataactcttgccctctgccttccaagattctggtgctgagacttatggagtgtcttggaggttgccttctgccccccaaccctgctcccagctggccctcccaggcctgggttgctggcctctgctttatcaggattctcaagagggacagctggtttatgttgcatgactgttccctgcatatctgctctggttttaaatagcttatctgagcagctggaggaccacatgggcttatatggcgtggggtacatgttcctgtagccttgtccctggcacctgccaaaatagcagccaacaccccccacccccaccgccatccccctgccccacccgtcccctgtcgcacattcctccctccgcagggctggctcaccaggccccagcccacatgcctgcttaaagccctctccatcctctgcctcacccagtccccgctgagactgagcagacgcctccaggatctgtcggcagggtttagtgaaccgtcagatcctgcagaagttggtcgtgaggcactagtccgccaccatgcctgagcctggaaagaaacctgtgtccgccttcagcaagaagcccagatccgttgaagtggccgctggaagccctgccgtgtttgaggccgaaacagaacgcgctggcgtgaaagttcgatggcagagaggcggcagcgatatcagcgccagcaacaaatatggcctggccaccgagggcaccagacacacactgacagtcagagaagtgggccctgccgatcagggctcttatgccgtgattgccggcagcagcaaagtgaagttcgacctgaaagtgatcgaggccgagaaggccgagcctatgcttgctcctgctccagctcctgctgaagctacaggtgctcctggcgaagctccagcaccagctgctgaactgggagagtctgccccatctcctaagggctctagcagcgccgctctgaatggacctacacctggcgctcccgatgatcccatcggcctgtttgttatgaggccccaggatggcgaagtgacagtcggcggcagcatcacctttagcgctagagttgcaggcgccagcctgctgaaacctcctgtggtcaagtggttcaaaggcaaatgggtcgacctgtcctccaaagtgggccagcatctgcagctccacgacagctacgatagagccagcaaggtgtacctgttcgagctgcacatcacagacgcccagccagcctttaccggcagctacagatgtgaagtgtccaccaaggacaagttcgactgcagcaacttcaacctgaccgtgcacgaggccatgggcacaggcgatctggatctgctgagcgcctttcggagaacatctctggctggcggcggaagaagaatcagcgacagccacgaggataccggcatcctggatttcagcagcctgctcaagaagcgggacagcttcagaacccctcgggacagcaaactggaagctcccgccgaggaagatgtctgggagatcctgagacaggcccctcctagcgagtacgagagaatcgcctttcagtacggcgtgaccgacctgagaggcatgctgaagaggctgaagggcatgcgccgggacgagaagaagtccacagccttccagaagaagctggaacccgcctaccaggtgtccaagggccacaagatcagactgaccgtggaactggccgaccacgacgccgaagtgaagtggctgaaaaacggccaagagattcagatgagcggcagcaagtacatcttcgagagcatcggcgccaagcggaccctgacaatcagccagtgtagcctggccgatgacgccgcctatcagtgtgttgttggcggcgagaagtgcagcaccgagctgttcgtgaaagaacctccagtgctgatcacccggcctctggaagatcagctggtcatggtcggacagcgcgtggaattcgagtgcgaggtttccgaagagggcgcccaagtcaaatggctgaaggatggcgtcgagctgaccagagaggaaaccttcaagtaccggttcaagaaggacggccagcggcaccacctgatcatcaatgaagccatgctggaagatgccggccactacgccttgtgtacatctggtggacaggccctggccgagctgattgtgcaagagaagaaactcgaggtgtaccagtctatcgccgacctgatggtcggagccaaagaccaggccgtgttcaagtgcgaagtgtccgacgagaatgtgcgcggcgtgtggctcaagaacggcaaagaactggtgcccgacagccggatcaaggtgtcccacattggcagagtgcacaagctgaccatcgacgacgtgacccctgctgacgaggccgattacagctttgtgcctgagggcttcgcctgtaacctgagcgccaagctgcactttatggaagtcaagatcgacttcgtgccccggcaagagcctcctaagatccacctggattgccctggcagaatccccgacacaatcgtggtggtggccggaaacaagctgagactggatgtgcccatcagcggcgatcctgctcctacagtgatctggcagaaggccatcacacagggcaacaaggcccctgctagacccgctcctgatgctcctgaagataccggcgatagcgacgagtgggtgttcgacaagaaactgctgtgcgagacagagggaagagtgcgagtggaaaccacaaaggaccgcagcatcttcaccgtggaaggcgccgagaaagaggacgagggcgtctacacagtgaccgtgaagaatcccgtgggcgaagatcaagtgaacctgacagtgaaagtcatcgacgtgcccgacgctcctgccgctccaaagatctctaacgtgggagaagatagctgcaccgtgcagtgggagcctccagcttatgatggcggacagcctatcctgggctacatcctggaacgcaagaagaaaaagtcctaccggtggatgcggctgaacttcgatctgatccaagagctgagccacgaagccagacggatgatcgaaggcgtggtgtacgagatgagagtgtacgccgtgaacgccatcggcatgagcagaccttctccagcctctcagcccttcatgcctatcggccctccaagcgaacctacacacctggccgttgaggacgtgtccgataccaccgtgtctctgaaatggcggcctcctgagagagttggagctggcggactggatggctacagcgtggaatactgtccagagggctgtagcgagtgggttgcagctctgcagggactgaccgagcacacctctatcctggtcaaggacctgcctaccggcgctagactgctgtttagagtgcgggcccacaacatggctggaccaggtgcaccagtgaccaccacagaacccgtgacagtgcaagaaatcctgcagcggccaagactgcagctgcccagacacctgaggcagaccatccagaaaaaagtgggcgagcccgtgaacctgctgatcccatttcaaggcaagcccagacctcaagtgacctggaccaaagagggacagcctctggccggcgaagaggtgtccatcagaaacagccccaccgacaccatcctgttcatcagagccgccagaagggtgcactccggcacctatcaagtgactgtgcggatcgagaacatggaagataaggccacactggtgctgcaggtcgtggacaaacccagtcctcctcaggacctgcgcgtgacagatgcctggggactgaatgtggctctggaatggaagcctccacaggacgtgggcaacacagagctgtggggctataccgtgcagaaagccgacaaaaagaccatggaatggttcaccgtgctggaacactaccggcggacccattgtgtggtgcctgagctgatcatcggcaacggctactacttccgggtgttcagccagaatatggtcggattcagcgatagggccgccaccacaaaagaaccagtgttcatccccagacctggcatcacctacgagcctccaaactacaaggccctggacttcagcgaggcccctagctttacacagcccctggtcaacagaagcgtgatcgccggctacaccgccatgctgtgttgtgccgttagaggcagccccaagcctaagatctcctggtttaagaacggcctggacctcggcgaggacgccagattcagaatgttcagcaagcagggcgtgctgaccctggaaatcagaaagccctgtcctttcgacggcggcatctacgtgtgcagagccaccaatctgcagggcgaagctagatgcgagtgcagactggaagttcgggtgccccagtaagcggccgccaataaaggatcgtttattttcattggaagcgtgtgttggttttttgatcaggcgcgtccaagcttgcatgctggggagagatctgcggccgcaggaacccctagtgatggagttggccactccctctctgcgcgctcgctcgctcactgaggccgggcgaccaaaggtcgcccgacgcccgggctttgcccgggcggcctcagtgagcgagcgagcgcgcag

SEQ ID NO: 33 - DNA, 4491 bp, synthetic construct
  source 1..4491: mol_type = other DNA
ctcagtccattaggagccagtagcctggaagatgtctttacccccagcatcagttcaagtggagcagcacataactcttgccctctgccttccaagattctggtgctgagacttatggagtgtcttggaggttgccttctgccccccaaccctgctcccagctggccctcccaggcctgggttgctggcctctgctttatcaggattctcaagagggacagctggtttatgttgcatgactgttccctgcatatctgctctggttttaaatagcttatctgagcagctggaggaccacatgggcttatatggcgtggggtacatgttcctgtagccttgtccctggcacctgccaaaatagcagccaacaccccccacccccaccgccatccccctgccccacccgtcccctgtcgcacattcctccctccgcagggctggctcaccaggccccagcccacatgcctgcttaaagccctctccatcctctgcctcacccagtccccgctgagactgagcagacgcctccaggatctgtcggcagggtttagtgaaccgtcagatcctgcagaagttggtcgtgaggcactagtccgccaccatgcctgagccggggaagaagccagtctcagcttttagcaagaagccacggtcagtggaagtggccgcaggcagccctgccgtgttcgaggccgagacagagcgggcaggagtgaaggtgcgctggcagcgcggaggcagtgacatcagcgccagcaacaagtacggcctggccacagagggcacacggcatacgctgacagtgcgggaagtgggccctgccgaccagggatcttacgcagtcattgctggctcctccaaggtcaagttcgacctcaaggtcatagaggcagagaaggcagagcccatgctggcccctgcccctgcccctgctgaggccactggagcccctggagaagccccggccccagccgctgagctgggagaaagtgccccaagtcccaaagggtcaagctcagcagctctcaatggtcctacccctggagcccccgatgaccccattggcctcttcgtgatgcggccacaggatggcgaggtgaccgtgggtggcagcatcaccttctcagcccgcgtggccggcgccagcctcctgaagccgcctgtggtcaagtggttcaagggcaaatgggtggacctgagcagcaaggtgggccagcacctgcagctgcacgacagctacgaccgcgccagcaaggtctatctgttcgagctgcacatcaccgatgcccagcctgccttcactggcagctaccgctgtgaggtgtccaccaaggacaaatttgactgctccaacttcaatctcactgtccacgaggccatgggcaccggagacctggacctcctatcagccttccgccgcacgagcctggctggaggtggtcggcggatcagtgatagccatgaggacactgggattctggacttcagctcactgctgaaaaagagagacagtttccggaccccgagggactcgaagctggaggcaccagcagaggaggacgtgtgggagatcctacggcaggcacccccatctgagtacgagcgcatcgccttccagtacggcgtcactgacctgcgcggcatgctaaagaggctcaagggcatgaggcgcgatgagaagaagagcacagcctttcagaagaagctggagccggcctaccaggtgagcaaaggccacaagatccggctgaccgtggaactggctgaccatgacgctgaggtcaaatggctcaagaatggccaggagatccagatgagcggcagcaagtacatctttgagtccatcggtgccaagcgtaccctgaccatcagccagtgctcattggcggacgacgcagcctaccagtgcgtggtgggtggcgagaagtgtagcacggagctctttgtgaaagagccccctgtgctcatcacgcgccccttggaggaccagctggtgatggtggggcagcgggtggagtttgagtgtgaagtatcggaggagggggcgcaagtcaaatggctgaaggacggggtggagctgacccgggaggagaccttcaaataccggttcaagaaggacgggcagagacaccacctgatcatcaacgaggccatgctggaggacgcggggcactatgcactgtgcactagcgggggccaggcgctggctgagctcattgtgcaggaaaagaagctggaggtgtaccagagcatcgcagacctgatggtgggcgcaaaggaccaggcggtgttcaaatgtgaggtctcagatgagaatgttcggggtgtgtggctgaagaatgggaaggagctggtgcccgacagccgcataaaggtgtcccacatcgggcgggtccacaaactgaccattgacgacgtcacacctgccgacgaggctgactacagctttgtgcccgagggcttcgcctgcaacctgtcagccaagctccacttcatggaggtcaagattgacttcgtacccaggcaggaacctcccaagatccacctggactgcccaggccgcataccagacaccattgtggttgtagctggaaataagctacgtctggacgtccctatctctggggaccctgctcccactgtgatctggcagaaggctatcacgcaggggaataaggccccagccaggccagccccagatgccccagaggacacaggtgacagcgatgagtgggtgtttgacaagaagctgctgtgtgagaccgagggccgggtccgcgtggagaccaccaaggaccgcagcatcttcacggtcgagggggcagagaaggaagatgagggcgtctacacggtcacagtgaagaaccctgtgggcgaggaccaggtcaacctcacagtcaaggtcatcgacgtgccagacgcacctgcggcccccaagatcagcaacgtgggagaggactcctgcacagtacagtgggagccgcctgcctacgatggcgggcagcccatcctgggctacatcctggagcgcaagaagaagaagagctaccggtggatgcggctgaacttcgacctgattcaggagctgagtcatgaagcgcggcgcatgatcgagggcgtggtgtacgagatgcgcgtctacgcggtcaacgccatcggcatgtccaggcccagccctgcctcccagcccttcatgcctatcggtccccccagcgaacccacccacctggcagtagaggacgtctctgacaccacggtctccctcaagtggcggcccccagagcgcgtgggagcaggaggcctggatggctacagcgtggagtactgcccagagggctgctcagagtgggtggctgccctgcaggggctgacagagcacacatcgatactggtgaaggacctgcccacgggggcccggctgcttttccgagtgcgggcacacaatatggcagggcctggagcccctgttaccaccacggagccggtgacagtgcaggagatcctgcaacggccacggcttcagctgcccaggcacctgcgccagaccattcagaagaaggtcggggagcctgtgaaccttctcatccctttccagggcaagccccggcctcaggtgacctggaccaaagaggggcagcccctggcaggcgaggaggtgagcatccgcaacagccccacagacaccatcctgttcatccgggccgctcgccgcgtgcattcaggcacttaccaggtgacggtgcgcattgagaacatggaggacaaggccacgctggtgctgcaggttgttgacaagccaagtcctccccaggatctccgggtgactgacgcctggggtcttaatgtggctctggagtggaagccaccccaggatgtcggcaacacggaactctgggggtacacagtgcagaaagccgacaagaagaccatggagtggttcaccgtcttggagcattaccgccgcacccactgcgtggtgccagagctcatcattggcaatggctactacttccgcgtcttcagccagaatatggttggctttagtgacagagcggccaccaccaaggagcccgtctttatccccagaccaggcatcacctatgagccacccaactataaggccctggacttctccgaggccccaagcttcacccagcccctggtgaaccgctcggtcatcgcgggctacactgctatgctctgctgtgctgtccggggtagccccaagcccaagatttcctggttcaagaatggcctggacctgggagaagacgcccgcttccgcatgttcagcaagcagggagtgttgactctggagattagaaagccctgcccctttgacgggggcatctatgtctgcagggccaccaacttacagggcgaggcacggtgtgagtgccgcctggaggtgcgagtgcctcagtgagcggccgccaataaaggatcgtttattttcattggaagcgtgtgttggttttttgatcaggcgcg

SEQ ID NO: 34 - DNA, 4831 bp, synthetic construct
  source 1..4831: mol_type = other DNA
ttggccactccctctctgcgcgctcgctcgctcactgaggccgcccgggcaaagcccgggcgtcgggcgacctttggtcgcccggcctcagtgagcgagcgagcgcgcagagagggagtggccaactccatcactaggggttcctgcggccgcacgcgtctcagtccattaggagccagtagcctggaagatgtctttacccccagcatcagttcaagtggagcagcacataactcttgccctctgccttccaagattctggtgctgagacttatggagtgtcttggaggttgccttctgccccccaaccctgctcccagctggccctcccaggcctgggttgctggcctctgctttatcaggattctcaagagggacagctggtttatgttgcatgactgttccctgcatatctgctctggttttaaatagcttatctgagcagctggaggaccacatgggcttatatggcgtggggtacatgttcctgtagccttgtccctggcacctgccaaaatagcagccaacaccccccacccccaccgccatccccctgccccacccgtcccctgtcgcacattcctccctccgcagggctggctcaccaggccccagcccacatgcctgcttaaagccctctccatcctctgcctcacccagtccccgctgagactgagcagacgcctccaggatctgtcggcagggtttagtgaaccgtcagatcctgcagaagttggtcgtgaggcactagtccgccaccatgcctgagccggggaagaagccagtctcagcttttagcaagaagccacggtcagtggaagtggccgcaggcagccctgccgtgttcgaggccgagacagagcgggcaggagtgaaggtgcgctggcagcgcggaggcagtgacatcagcgccagcaacaagtacggcctggccacagagggcacacggcatacgctgacagtgcgggaagtgggccctgccgaccagggatcttacgcagtcattgctggctcctccaaggtcaagttcgacctcaaggtcatagaggcagagaaggcagagcccatgctggcccctgcccctgcccctgctgaggccactggagcccctggagaagccccggccccagccgctgagctgggagaaagtgccccaagtcccaaagggtcaagctcagcagctctcaatggtcctacccctggagcccccgatgaccccattggcctcttcgtgatgcggccacaggatggcgaggtgaccgtgggtggcagcatcaccttctcagcccgcgtggccggcgccagcctcctgaagccgcctgtggtcaagtggttcaagggcaaatgggtggacctgagcagcaaggtgggccagcacctgcagctgcacgacagctacgaccgcgccagcaaggtctatctgttcgagctgcacatcaccgatgcccagcctgccttcactggcagctaccgctgtgaggtgtccaccaaggacaaatttgactgctccaacttcaatctcactgtccacgaggccatgggcaccggagacctggacctcctatcagccttccgccgcacgagcctggctggaggtggtcggcggatcagtgatagccatgaggacactgggattctggacttcagctcactgctgaaaaagagagacagtttccggaccccgagggactcgaagctggaggcaccagcagaggaggacgtgtgggagatcctacggcaggcacccccatctgagtacgagcgcatcgccttccagtacggcgtcactgacctgcgcggcatgctaaagaggctcaagggcatgaggcgcgatgagaagaagagcacagcctttcagaagaagctggagccggcctaccaggtgagcaaaggccacaagatccggctgaccgtggaactggctgaccatgacgctgaggtcaaatggctcaagaatggccaggagatccagatgagcggcagcaagtacatctttgagtccatcggtgccaagcgtaccctgaccatcagccagtgctcattggcggacgacgcagcctaccagtgcgtggtgggtggcgagaagtgtagcacggagctctttgtgaaagagccccctgtgctcatcacgcgccccttggaggaccagctggtgatggtggggcagcgggtggagtttgagtgtgaagtatcggaggagggggcgcaagtcaaatggctgaaggacggggtggagctgacccgggaggagaccttcaaataccggttcaagaaggacgggcagagacaccacctgatcatcaacgaggccatgctggaggacgcggggcactatgcactgtgcactagcgggggccaggcgctggctgagctcattgtgcaggaaaagaagctggaggtgtaccagagcatcgcagacctgatggtgggcgcaaaggaccaggcggtgttcaaatgtgaggtctcagatgagaatgttcggggtgtgtggctgaagaatgggaaggagctggtgcccgacagccgcataaaggtgtcccacatcgggcgggtccacaaactgaccattgacgacgtcacacctgccgacgaggctgactacagctttgtgcccgagggcttcgcctgcaacctgtcagccaagctccacttcatggaggtcaagattgacttcgtacccaggcaggaacctcccaagatccacctggactgcccaggccgcataccagacaccattgtggttgtagctggaaataagctacgtctggacgtccctatctctggggaccctgctcccactgtgatctggcagaaggctatcacgcaggggaataaggccccagccaggccagccccagatgccccagaggacacaggtgacagcgatgagtgggtgtttgacaagaagctgctgtgtgagaccgagggccgggtccgcgtggagaccaccaaggaccgcagcatcttcacggtcgagggggcagagaaggaagatgagggcgtctacacggtcacagtgaagaaccctgtgggcgaggaccaggtcaacctcacagtcaaggtcatcgacgtgccagacgcacctgcggcccccaagatcagcaacgtgggagaggactcctgcacagtacagtgggagccgcctgcctacgatggcgggcagcccatcctgggctacatcctggagcgcaagaagaagaagagctaccggtggatgcggctgaacttcgacctgattcaggagctgagtcatgaagcgcggcgcatgatcgagggcgtggtgtacgagatgcgcgtctacgcggtcaacgccatcggcatgtccaggcccagccctgcctcccagcccttcatgcctatcggtccccccagcgaacccacccacctggcagtagaggacgtctctgacaccacggtctccctcaagtggcggcccccagagcgcgtgggagcaggaggcctggatggctacagcgtggagtactgcccagagggctgctcagagtgggtggctgccctgcaggggctgacagagcacacatcgatactggtgaaggacctgcccacgggggcccggctgcttttccgagtgcgggcacacaatatggcagggcctggagcccctgttaccaccacggagccggtgacagtgcaggagatcctgcaacggccacggcttcagctgcccaggcacctgcgccagaccattcagaagaaggtcggggagcctgtgaaccttctcatccctttccagggcaagccccggcctcaggtgacctggaccaaagaggggcagcccctggcaggcgaggaggtgagcatccgcaacagccccacagacaccatcctgttcatccgggccgctcgccgcgtgcattcaggcacttaccaggtgacggtgcgcattgagaacatggaggacaaggccacgctggtgctgcaggttgttgacaagccaagtcctccccaggatctccgggtgactgacgcctggggtcttaatgtggctctggagtggaagccaccccaggatgtcggcaacacggaactctgggggtacacagtgcagaaagccgacaagaagaccatggagtggttcaccgtcttggagcattaccgccgcacccactgcgtggtgccagagctcatcattggcaatggctactacttccgcgtcttcagccagaatatggttggctttagtgacagagcggccaccaccaaggagcccgtctttatccccagaccaggcatcacctatgagccacccaactataaggccctggacttctccgaggccccaagcttcacccagcccctggtgaaccgctcggtcatcgcgggctacactgctatgctctgctgtgctgtccggggtagccccaagcccaagatttcctggttcaagaatggcctggacctgggagaagacgcccgcttccgcatgttcagcaagcagggagtgttgactctggagattagaaagccctgcccctttgacgggggcatctatgtctgcagggccaccaacttacagggcgaggcacggtgtgagtgccgcctggaggtgcgagtgcctcagtgagcggccgccaataaaggatcgtttattttcattggaagcgtgtgttggttttttgatcaggcgcgtccaagcttgcatgctggggagagatctgcggccgcaggaacccctagtgatggagttggccactccctctctgcgcgctcgctcgctcactgaggccgggcgaccaaaggtcgcccgacgcccgggctttgcccgggcggcctcagtgagcgagcgagcgcgcagagagggagtggccaa

SEQ ID NO: 35 - DNA, 4801 bp, synthetic construct
  source 1..4801: mol_type = other DNA
ctgcgcgctcgctcgctcactgaggccgcccgggcaaagcccgggcgtcgggcgacctttggtcgcccggcctcagtgagcgagcgagcgcgcagagagggagtggccaactccatcactaggggttcctgcggccgcacgcgtctcagtccattaggagccagtagcctggaagatgtctttacccccagcatcagttcaagtggagcagcacataactcttgccctctgccttccaagattctggtgctgagacttatggagtgtcttggaggttgccttctgccccccaaccctgctcccagctggccctcccaggcctgggttgctggcctctgctttatcaggattctcaagagggacagctggtttatgttgcatgactgttccctgcatatctgctctggttttaaatagcttatctgagcagctggaggaccacatgggcttatatggcgtggggtacatgttcctgtagccttgtccctggcacctgccaaaatagcagccaacaccccccacccccaccgccatccccctgccccacccgtcccctgtcgcacattcctccctccgcagggctggctcaccaggccccagcccacatgcctgcttaaagccctctccatcctctgcctcacccagtccccgctgagactgagcagacgcctccaggatctgtcggcagggtttagtgaaccgtcagatcctgcagaagttggtcgtgaggcactagtccgccaccatgcctgagccggggaagaagccagtctcagcttttagcaagaagccacggtcagtggaagtggccgcaggcagccctgccgtgttcgaggccgagacagagcgggcaggagtgaaggtgcgctggcagcgcggaggcagtgacatcagcgccagcaacaagtacggcctggccacagagggcacacggcatacgctgacagtgcgggaagtgggccctgccgaccagggatcttacgcagtcattgctggctcctccaaggtcaagttcgacctcaaggtcatagaggcagagaaggcagagcccatgctggcccctgcccctgcccctgctgaggccactggagcccctggagaagccccggccccagccgctgagctgggagaaagtgccccaagtcccaaagggtcaagctcagcagctctcaatggtcctacccctggagcccccgatgaccccattggcctcttcgtgatgcggccacaggatggcgaggtgaccgtgggtggcagcatcaccttctcagcccgcgtggccggcgccagcctcctgaagccgcctgtggtcaagtggttcaagggcaaatgggtggacctgagcagcaaggtgggccagcacctgcagctgcacgacagctacgaccgcgccagcaaggtctatctgttcgagctgcacatcaccgatgcccagcctgccttcactggcagctaccgctgtgaggtgtccaccaaggacaaatttgactgctccaacttcaatctcactgtccacgaggccatgggcaccggagacctggacctcctatcagccttccgccgcacgagcctggctggaggtggtcggcggatcagtgatagccatgaggacactgggattctggacttcagctcactgctgaaaaagagagacagtttccggaccccgagggactcgaagctggaggcaccagcagaggaggacgtgtgggagatcctacggcaggcacccccatctgagtacgagcgcatcgccttccagtacggcgtcactgacctgcgcggcatgctaaagaggctcaagggcatgaggcgcgatgagaagaagagcacagcctttcagaagaagctggagccggcctaccaggtgagcaaaggccacaagatccggctgaccgtggaactggctgaccatgacgctgaggtcaaatggctcaagaatggccaggagatccagatgagcggcagcaagtacatctttgagtccatcggtgccaagcgtaccctgaccatcagccagtgctcattggcggacgacgcagcctaccagtgcgtggtgggtggcgagaagtgtagcacggagctctttgtgaaagagccccctgtgctcatcacgcgccccttggaggaccagctggtgatggtggggcagcgggtggagtttgagtgtgaagtatcggaggagggggcgcaagtcaaatggctgaaggacggggtggagctgacccgggaggagaccttcaaataccggttcaagaaggacgggcagagacaccacctgatcatcaacgaggccatgctggaggacgcggggcactatgcactgtgcactagcgggggccaggcgctggctgagctcattgtgcaggaaaagaagctggaggtgtaccagagcatcgcagacctgatggtgggcgcaaaggaccaggcggtgttcaaatgtgaggtctcagatgagaatgttcggggtgtgtggctgaagaatgggaaggagctggtgcccgacagccgcataaaggtgtcccacatcgggcgggtccacaaactgaccattgacgacgtcacacctgccgacgaggctgactacagctttgtgcccgagggcttcgcctgcaacctgtcagccaagctccacttcatggaggtcaagattgacttcgtacccaggcaggaacctcccaagatccacctggactgcccaggccgcataccagacaccattgtggttgtagctggaaataagctacgtctggacgtccctatctctggggaccctgctcccactgtgatctggcagaaggctatcacgcaggggaataaggccccagccaggccagccccagatgccccagaggacacaggtgacagcgatgagtgggtgtttgacaagaagctgctgtgtgagaccgagggccgggtccgcgtggagaccaccaaggaccgcagcatcttcacggtcgagggggcagagaaggaagatgagggcgtctacacggtcacagtgaagaaccctgtgggcgaggaccaggtcaacctcacagtcaaggtcatcgacgtgccagacgcacctgcggcccccaagatcagcaacgtgggagaggactcctgcacagtacagtgggagccgcctgcctacgatggcgggcagcccatcctgggctacatcctggagcgcaagaagaagaagagctaccggtggatgcggctgaacttcgacctgattcaggagctgagtcatgaagcgcggcgcatgatcgagggcgtggtgtacgagatgcgcgtctacgcggtcaacgccatcggcatgtccaggcccagccctgcctcccagcccttcatgcctatcggtccccccagcgaacccacccacctggcagtagaggacgtctctgacaccacggtctccctcaagtggcggcccccagagcgcgtgggagcaggaggcctggatggctacagcgtggagtactgcccagagggctgctcagagtgggtggctgccctgcaggggctgacagagcacacatcgatactggtgaaggacctgcccacgggggcccggctgcttttccgagtgcgggcacacaatatggcagggcctggagcccctgttaccaccacggagccggtgacagtgcaggagatcctgcaacggccacggcttcagctgcccaggcacctgcgccagaccattcagaagaaggtcggggagcctgtgaaccttctcatccctttccagggcaagccccggcctcaggtgacctggaccaaagaggggcagcccctggcaggcgaggaggtgagcatccgcaacagccccacagacaccatcctgttcatccgggccgctcgccgcgtgcattcaggcacttaccaggtgacggtgcgcattgagaacatggaggacaaggccacgctggtgctgcaggttgttgacaagccaagtcctccccaggatctccgggtgactgacgcctggggtcttaatgtggctctggagtggaagccaccccaggatgtcggcaacacggaactctgggggtacacagtgcagaaagccgacaagaagaccatggagtggttcaccgtcttggagcattaccgccgcacccactgcgtggtgccagagctcatcattggcaatggctactacttccgcgtcttcagccagaatatggttggctttagtgacagagcggccaccaccaaggagcccgtctttatccccagaccaggcatcacctatgagccacccaactataaggccctggacttctccgaggccccaagcttcacccagcccctggtgaaccgctcggtcatcgcgggctacactgctatgctctgctgtgctgtccggggtagccccaagcccaagatttcctggttcaagaatggcctggacctgggagaagacgcccgcttccgcatgttcagcaagcagggagtgttgactctggagattagaaagccctgcccctttgacgggggcatctatgtctgcagggccaccaacttacagggcgaggcacggtgtgagtgccgcctggaggtgcgagtgcctcagtgagcggccgccaataaaggatcgtttattttcattggaagcgtgtgttggttttttgatcaggcgcgtccaagcttgcatgctggggagagatctgcggccgcaggaacccctagtgatggagttggccactccctctctgcgcgctcgctcgctcactgaggccgggcgaccaaaggtcgcccgacgcccgggctttgcccgggcggcctcagtgagcgagcgagcgcgcag

SEQ ID NO: 36 - DNA, 4640 bp, synthetic construct
  source 1..4640: mol_type = other DNA
ctcagtccattaggagccagtagcctggaagatgtctttacccccagcatcagttcaagtggagcagcacataactcttgccctctgccttccaagattctggtgctgagacttatggagtgtcttggaggttgccttctgccccccaaccctgctcccagctggccctcccaggcctgggttgctggcctctgctttatcaggattctcaagagggacagctggtttatgttgcatgactgttccctgcatatctgctctggttttaaatagcttatctgagcagctggaggaccacatgggcttatatggcgtggggtacatgttcctgtagccttgtccctggcacctgccaaaatagcagccaacaccccccacccccaccgccatccccctgccccacccgtcccctgtcgcacattcctccctccgcagggctggctcaccaggccccagcccacatgcctgcttaaagccctctccatcctctgcctcacccagtccccgctgagactgagcagacgcctccaggatctgtcggcagggtttagtgaaccgtcagatcctgcagaagttggtcgtgaggcactagtgggcaggtaagtatcaaggttacaagacaggtttaaggagaccaatagaaactgggcttgtcgagacagagaagactcttgcgtttctgataggcacctattggtcttactgacatccactttgcctttctctccacaggtgtactagtccgccaccatgcctgagccggggaagaagccagtctcagcttttagcaagaagccacggtcagtggaagtggccgcaggcagccctgccgtgttcgaggccgagacagagcgggcaggagtgaaggtgcgctggcagcgcggaggcagtgacatcagcgccagcaacaagtacggcctggccacagagggcacacggcatacgctgacagtgcgggaagtgggccctgccgaccagggatcttacgcagtcattgctggctcctccaaggtcaagttcgacctcaaggtcatagaggcagagaaggcagagcccatgctggcccctgcccctgcccctgctgaggccactggagcccctggagaagccccggccccagccgctgagctgggagaaagtgccccaagtcccaaagggtcaagctcagcagctctcaatggtcctacccctggagcccccgatgaccccattggcctcttcgtgatgcggccacaggatggcgaggtgaccgtgggtggcagcatcaccttctcagcccgcgtggccggcgccagcctcctgaagccgcctgtggtcaagtggttcaagggcaaatgggtggacctgagcagcaaggtgggccagcacctgcagctgcacgacagctacgaccgcgccagcaaggtctatctgttcgagctgcacatcaccgatgcccagcctgccttcactggcagctaccgctgtgaggtgtccaccaaggacaaatttgactgctccaacttcaatctcactgtccacgaggccatgggcaccggagacctggacctcctatcagccttccgccgcacgagcctggctggaggtggtcggcggatcagtgatagccatgaggacactgggattctggacttcagctcactgctgaaaaagagagacagtttccggaccccgagggactcgaagctggaggcaccagcagaggaggacgtgtgggagatcctacggcaggcacccccatctgagtacgagcgcatcgccttccagtacggcgtcactgacctgcgcggcatgctaaagaggctcaagggcatgaggcgcgatgagaagaagagcacagcctttcagaagaagctggagccggcctaccaggtgagcaaaggccacaagatccggctgaccgtggaactggctgaccatgacgctgaggtcaaatggctcaagaatggccaggagatccagatgagcggcagcaagtacatctttgagtccatcggtgccaagcgtaccctgaccatcagccagtgctcattggcggacgacgcagcctaccagtgcgtggtgggtggcgagaagtgtagcacggagctctttgtgaaagagccccctgtgctcatcacgcgccccttggaggaccagctggtgatggtggggcagcgggtggagtttgagtgtgaagtatcggaggagggggcgcaagtcaaatggctgaaggacggggtggagctgacccgggaggagaccttcaaataccggttcaagaaggacgggcagagacaccacctgatcatcaacgaggccatgctggaggacgcggggcactatgcactgtgcactagcgggggccaggcgctggctgagctcattgtgcaggaaaagaagctggaggtgtaccagagcatcgcagacctgatggtgggcgcaaaggaccaggcggtgttcaaatgtgaggtctcagatgagaatgttcggggtgtgtggctgaagaatgggaaggagctggtgcccgacagccgcataaaggtgtcccacatcgggcgggtccacaaactgaccattgacgacgtcacacctgccgacgaggctgactacagctttgtgcccgagggcttcgcctgcaacctgtcagccaagctccacttcatggaggtcaagattgacttcgtacccaggcaggaacctcccaagatccacctggactgcccaggccgcataccagacaccattgtggttgtagctggaaataagctacgtctggacgtccctatctctggggaccctgctcccactgtgatctggcagaaggctatcacgcaggggaataaggccccagccaggccagccccagatgccccagaggacacaggtgacagcgatgagtgggtgtttgacaagaagctgctgtgtgagaccgagggccgggtccgcgtggagaccaccaaggaccgcagcatcttcacggtcgagggggcagagaaggaagatgagggcgtctacacggtcacagtgaagaaccctgtgggcgaggaccaggtcaacctcacagtcaaggtcatcgacgtgccagacgcacctgcggcccccaagatcagcaacgtgggagaggactcctgcacagtacagtgggagccgcctgcctacgatggcgggcagcccatcctgggctacatcctggagcgcaagaagaagaagagctaccggtggatgcggctgaacttcgacctgattcaggagctgagtcatgaagcgcggcgcatgatcgagggcgtggtgtacgagatgcgcgtctacgcggtcaacgccatcggcatgtccaggcccagccctgcctcccagcccttcatgcctatcggtccccccagcgaacccacccacctggcagtagaggacgtctctgacaccacggtctccctcaagtggcggcccccagagcgcgtgggagcaggaggcctggatggctacagcgtggagtactgcccagagggctgctcagagtgggtggctgccctgcaggggctgacagagcacacatcgatactggtgaaggacctgcccacgggggcccggctgcttttccgagtgcgggcacacaatatggcagggcctggagcccctgttaccaccacggagccggtgacagtgcaggagatcctgcaacggccacggcttcagctgcccaggcacctgcgccagaccattcagaagaaggtcggggagcctgtgaaccttctcatccctttccagggcaagccccggcctcaggtgacctggaccaaagaggggcagcccctggcaggcgaggaggtgagcatccgcaacagccccacagacaccatcctgttcatccgggccgctcgccgcgtgcattcaggcacttaccaggtgacggtgcgcattgagaacatggaggacaaggccacgctggtgctgcaggttgttgacaagccaagtcctccccaggatctccgggtgactgacgcctggggtcttaatgtggctctggagtggaagccaccccaggatgtcggcaacacggaactctgggggtacacagtgcagaaagccgacaagaagaccatggagtggttcaccgtcttggagcattaccgccgcacccactgcgtggtgccagagctcatcattggcaatggctactacttccgcgtcttcagccagaatatggttggctttagtgacagagcggccaccaccaaggagcccgtctttatccccagaccaggcatcacctatgagccacccaactataaggccctggacttctccgaggccccaagcttcacccagcccctggtgaaccgctcggtcatcgcgggctacactgctatgctctgctgtgctgtccggggtagccccaagcccaagatttcctggttcaagaatggcctggacctgggagaagacgcccgcttccgcatgttcagcaagcagggagtgttgactctggagattagaaagccctgcccctttgacgggggcatctatgtctgcagggccaccaacttacagggcgaggcacggtgtgagtgccgcctggaggtgcgagtgcctcagtgagcggccgccaataaaggatcgtttattttcattggaagcgtgtgttggttttttgatcaggcgcg

SEQ ID NO: 37 - DNA, 4980 bp, synthetic construct
  source 1..4980: mol_type = other DNA
ttggccactccctctctgcgcgctcgctcgctcactgaggccgcccgggcaaagcccgggcgtcgggcgacctttggtcgcccggcctcagtgagcgagcgagcgcgcagagagggagtggccaactccatcactaggggttcctgcggccgcacgcgtctcagtccattaggagccagtagcctggaagatgtctttacccccagcatcagttcaagtggagcagcacataactcttgccctctgccttccaagattctggtgctgagacttatggagtgtcttggaggttgccttctgccccccaaccctgctcccagctggccctcccaggcctgggttgctggcctctgctttatcaggattctcaagagggacagctggtttatgttgcatgactgttccctgcatatctgctctggttttaaatagcttatctgagcagctggaggaccacatgggcttatatggcgtggggtacatgttcctgtagccttgtccctggcacctgccaaaatagcagccaacaccccccacccccaccgccatccccctgccccacccgtcccctgtcgcacattcctccctccgcagggctggctcaccaggccccagcccacatgcctgcttaaagccctctccatcctctgcctcacccagtccccgctgagactgagcagacgcctccaggatctgtcggcagggtttagtgaaccgtcagatcctgcagaagttggtcgtgaggcactagtgggcaggtaagtatcaaggttacaagacaggtttaaggagaccaatagaaactgggcttgtcgagacagagaagactcttgcgtttctgataggcacctattggtcttactgacatccactttgcctttctctccacaggtgtactagtccgccaccatgcctgagccggggaagaagccagtctcagcttttagcaagaagccacggtcagtggaagtggccgcaggcagccctgccgtgttcgaggccgagacagagcgggcaggagtgaaggtgcgctggcagcgcggaggcagtgacatcagcgccagcaacaagtacggcctggccacagagggcacacggcatacgctgacagtgcgggaagtgggccctgccgaccagggatcttacgcagtcattgctggctcctccaaggtcaagttcgacctcaaggtcatagaggcagagaaggcagagcccatgctggcccctgcccctgcccctgctgaggccactggagcccctggagaagccccggccccagccgctgagctgggagaaagtgccccaagtcccaaagggtcaagctcagcagctctcaatggtcctacccctggagcccccgatgaccccattggcctcttcgtgatgcggccacaggatggcgaggtgaccgtgggtggcagcatcaccttctcagcccgcgtggccggcgccagcctcctgaagccgcctgtggtcaagtggttcaagggcaaatgggtggacctgagcagcaaggtgggccagcacctgcagctgcacgacagctacgaccgcgccagcaaggtctatctgttcgagctgcacatcaccgatgcccagcctgccttcactggcagctaccgctgtgaggtgtccaccaaggacaaatttgactgctccaacttcaatctcactgtccacgaggccatgggcaccggagacctggacctcctatcagccttccgccgcacgagcctggctggaggtggtcggcggatcagtgatagccatgaggacactgggattctggacttcagctcactgctgaaaaagagagacagtttccggaccccgagggactcgaagctggaggcaccagcagaggaggacgtgtgggagatcctacggcaggcacccccatctgagtacgagcgcatcgccttccagtacggcgtcactgacctgcgcggcatgctaaagaggctcaagggcatgaggcgcgatgagaagaagagcacagcctttcagaagaagctggagccggcctaccaggtgagcaaaggccacaagatccggctgaccgtggaactggctgaccatgacgctgaggtcaaatggctcaagaatggccaggagatccagatgagcggcagcaagtacatctttgagtccatcggtgccaagcgtaccctgaccatcagccagtgctcattggcggacgacgcagcctaccagtgcgtggtgggtggcgagaagtgtagcacggagctctttgtgaaagagccccctgtgctcatcacgcgccccttggaggaccagctggtgatggtggggcagcgggtggagtttgagtgtgaagtatcggaggagggggcgcaagtcaaatggctgaaggacggggtggagctgacccgggaggagaccttcaaataccggttcaagaaggacgggcagagacaccacctgatcatcaacgaggccatgctggaggacgcggggcactatgcactgtgcactagcgggggccaggcgctggctgagctcattgtgcaggaaaagaagctggaggtgtaccagagcatcgcagacctgatggtgggcgcaaaggaccaggcggtgttcaaatgtgaggtctcagatgagaatgttcggggtgtgtggctgaagaatgggaaggagctggtgcccgacagccgcataaaggtgtcccacatcgggcgggtccacaaactgaccattgacgacgtcacacctgccgacgaggctgactacagctttgtgcccgagggcttcgcctgcaacctgtcagccaagctccacttcatggaggtcaagattgacttcgtacccaggcaggaacctcccaagatccacctggactgcccaggccgcataccagacaccattgtggttgtagctggaaataagctacgtctggacgtccctatctctggggaccctgctcccactgtgatctggcagaaggctatcacgcaggggaataaggccccagccaggccagccccagatgccccagaggacacaggtgacagcgatgagtgggtgtttgacaagaagctgctgtgtgagaccgagggccgggtccgcgtggagaccaccaaggaccgcagcatcttcacggtcgagggggcagagaaggaagatgagggcgtctacacggtcacagtgaagaaccctgtgggcgaggaccaggtcaacctcacagtcaaggtcatcgacgtgccagacgcacctgcggcccccaagatcagcaacgtgggagaggactcctgcacagtacagtgggagccgcctgcctacgatggcgggcagcccatcctgggctacatcctggagcgcaagaagaagaagagctaccggtggatgcggctgaacttcgacctgattcaggagctgagtcatgaagcgcggcgcatgatcgagggcgtggtgtacgagatgcgcgtctacgcggtcaacgccatcggcatgtccaggcccagccctgcctcccagcccttcatgcctatcggtccccccagcgaacccacccacctggcagtagaggacgtctctgacaccacggtctccctcaagtggcggcccccagagcgcgtgggagcaggaggcctggatggctacagcgtggagtactgcccagagggctgctcagagtgggtggctgccctgcaggggctgacagagcacacatcgatactggtgaaggacctgcccacgggggcccggctgcttttccgagtgcgggcacacaatatggcagggcctggagcccctgttaccaccacggagccggtgacagtgcaggagatcctgcaacggccacggcttcagctgcccaggcacctgcgccagaccattcagaagaaggtcggggagcctgtgaaccttctcatccctttccagggcaagccccggcctcaggtgacctggaccaaagaggggcagcccctggcaggcgaggaggtgagcatccgcaacagccccacagacaccatcctgttcatccgggccgctcgccgcgtgcattcaggcacttaccaggtgacggtgcgcattgagaacatggaggacaaggccacgctggtgctgcaggttgttgacaagccaagtcctccccaggatctccgggtgactgacgcctggggtcttaatgtggctctggagtggaagccaccccaggatgtcggcaacacggaactctgggggtacacagtgcagaaagccgacaagaagaccatggagtggttcaccgtcttggagcattaccgccgcacccactgcgtggtgccagagctcatcattggcaatggctactacttccgcgtcttcagccagaatatggttggctttagtgacagagcggccaccaccaaggagcccgtctttatccccagaccaggcatcacctatgagccacccaactataaggccctggacttctccgaggccccaagcttcacccagcccctggtgaaccgctcggtcatcgcgggctacactgctatgctctgctgtgctgtccggggtagccccaagcccaagatttcctggttcaagaatggcctggacctgggagaagacgcccgcttccgcatgttcagcaagcagggagtgttgactctggagattagaaagccctgcccctttgacgggggcatctatgtctgcagggccaccaacttacagggcgaggcacggtgtgagtgccgcctggaggtgcgagtgcctcagtgagcggccgccaataaaggatcgtttattttcattggaagcgtgtgttggttttttgatcaggcgcgtccaagcttgcatgctggggagagatctgcggccgcaggaacccctagtgatggagttggccactccctctctgcgcgctcgctcgctcactgaggccgggcgaccaaaggtcgcccgacgcccgggctttgcccgggcggcctcagtgagcgagcgagcgcgcagagagggagtggccaa

SEQ ID NO: 38 - DNA, 4950 bp, synthetic construct
  source 1..4950: mol_type = other DNA
ctgcgcgctcgctcgctcactgaggccgcccgggcaaagcccgggcgtcgggcgacctttggtcgcccggcctcagtgagcgagcgagcgcgcagagagggagtggccaactccatcactaggggttcctgcggccgcacgcgtctcagtccattaggagccagtagcctggaagatgtctttacccccagcatcagttcaagtggagcagcacataactcttgccctctgccttccaagattctggtgctgagacttatggagtgtcttggaggttgccttctgccccccaaccctgctcccagctggccctcccaggcctgggttgctggcctctgctttatcaggattctcaagagggacagctggtttatgttgcatgactgttccctgcatatctgctctggttttaaatagcttatctgagcagctggaggaccacatgggcttatatggcgtggggtacatgttcctgtagccttgtccctggcacctgccaaaatagcagccaacaccccccacccccaccgccatccccctgccccacccgtcccctgtcgcacattcctccctccgcagggctggctcaccaggccccagcccacatgcctgcttaaagccctctccatcctctgcctcacccagtccccgctgagactgagcagacgcctccaggatctgtcggcagggtttagtgaaccgtcagatcctgcagaagttggtcgtgaggcactagtgggcaggtaagtatcaaggttacaagacaggtttaaggagaccaatagaaactgggcttgtcgagacagagaagactcttgcgtttctgataggcacctattggtcttactgacatccactttgcctttctctccacaggtgtactagtccgccaccatgcctgagccggggaagaagccagtctcagcttttagcaagaagccacggtcagtggaagtggccgcaggcagccctgccgtgttcgaggccgagacagagcgggcaggagtgaaggtgcgctggcagcgcggaggcagtgacatcagcgccagcaacaagtacggcctggccacagagggcacacggcatacgctgacagtgcgggaagtgggccctgccgaccagggatcttacgcagtcattgctggctcctccaaggtcaagttcgacctcaaggtcatagaggcagagaaggcagagcccatgctggcccctgcccctgcccctgctgaggccactggagcccctggagaagccccggccccagccgctgagctgggagaaagtgccccaagtcccaaagggtcaagctcagcagctctcaatggtcctacccctggagcccccgatgaccccattggcctcttcgtgatgcggccacaggatggcgaggtgaccgtgggtggcagcatcaccttctcagcccgcgtggccggcgccagcctcctgaagccgcctgtggtcaagtggttcaagggcaaatgggtggacctgagcagcaaggtgggccagcacctgcagctgcacgacagctacgaccgcgccagcaaggtctatctgttcgagctgcacatcaccgatgcccagcctgccttcactggcagctaccgctgtgaggtgtccaccaaggacaaatttgactgctccaacttcaatctcactgtccacgaggccatgggcaccggagacctggacctcctatcagccttccgccgcacgagcctggctggaggtggtcggcggatcagtgatagccatgaggacactgggattctggacttcagctcactgctgaaaaagagagacagtttccggaccccgagggactcgaagctggaggcaccagcagaggaggacgtgtgggagatcctacggcaggcacccccatctgagtacgagcgcatcgccttccagtacggcgtcactgacctgcgcggcatgctaaagaggctcaagggcatgaggcgcgatgagaagaagagcacagcctttcagaagaagctggagccggcctaccaggtgagcaaaggccacaagatccggctgaccgtggaactggctgaccatgacgctgaggtcaaatggctcaagaatggccaggagatccagatgagcggcagcaagtacatctttgagtccatcggtgccaagcgtaccctgaccatcagccagtgctcattggcggacgacgcagcctaccagtgcgtggtgggtggcgagaagtgtagcacggagctctttgtgaaagagccccctgtgctcatcacgcgccccttggaggaccagctggtgatggtggggcagcgggtggagtttgagtgtgaagtatcggaggagggggcgcaagtcaaatggctgaaggacggggtggagctgacccgggaggagaccttcaaataccggttcaagaaggacgggcagagacaccacctgatcatcaacgaggccatgctggaggacgcggggcactatgcactgtgcactagcgggggccaggcgctggctgagctcattgtgcaggaaaagaagctggaggtgtaccagagcatcgcagacctgatggtgggcgcaaaggaccaggcggtgttcaaatgtgaggtctcagatgagaatgttcggggtgtgtggctgaagaatgggaaggagctggtgcccgacagccgcataaaggtgtcccacatcgggcgggtccacaaactgaccattgacgacgtcacacctgccgacgaggctgactacagctttgtgcccgagggcttcgcctgcaacctgtcagccaagctccacttcatggaggtcaagattgacttcgtacccaggcaggaacctcccaagatccacctggactgcccaggccgcataccagacaccattgtggttgtagctggaaataagctacgtctggacgtccctatctctggggaccctgctcccactgtgatctggcagaaggctatcacgcaggggaataaggccccagccaggccagccccagatgccccagaggacacaggtgacagcgatgagtgggtgtttgacaagaagctgctgtgtgagaccgagggccgggtccgcgtggagaccaccaaggaccgcagcatcttcacggtcgagggggcagagaaggaagatgagggcgtctacacggtcacagtgaagaaccctgtgggcgaggaccaggtcaacctcacagtcaaggtcatcgacgtgccagacgcacctgcggcccccaagatcagcaacgtgggagaggactcctgcacagtacagtgggagccgcctgcctacgatggcgggcagcccatcctgggctacatcctggagcgcaagaagaagaagagctaccggtggatgcggctgaacttcgacctgattcaggagctgagtcatgaagcgcggcgcatgatcgagggcgtggtgtacgagatgcgcgtctacgcggtcaacgccatcggcatgtccaggcccagccctgcctcccagcccttcatgcctatcggtccccccagcgaacccacccacctggcagtagaggacgtctctgacaccacggtctccctcaagtggcggcccccagagcgcgtgggagcaggaggcctggatggctacagcgtggagtactgcccagagggctgctcagagtgggtggctgccctgcaggggctgacagagcacacatcgatactggtgaaggacctgcccacgggggcccggctgcttttccgagtgcgggcacacaatatggcagggcctggagcccctgttaccaccacggagccggtgacagtgcaggagatcctgcaacggccacggcttcagctgcccaggcacctgcgccagaccattcagaagaaggtcggggagcctgtgaaccttctcatccctttccagggcaagccccggcctcaggtgacctggaccaaagaggggcagcccctggcaggcgaggaggtgagcatccgcaacagccccacagacaccatcctgttcatccgggccgctcgccgcgtgcattcaggcacttaccaggtgacggtgcgcattgagaacatggaggacaaggccacgctggtgctgcaggttgttgacaagccaagtcctccccaggatctccgggtgactgacgcctggggtcttaatgtggctctggagtggaagccaccccaggatgtcggcaacacggaactctgggggtacacagtgcagaaagccgacaagaagaccatggagtggttcaccgtcttggagcattaccgccgcacccactgcgtggtgccagagctcatcattggcaatggctactacttccgcgtcttcagccagaatatggttggctttagtgacagagcggccaccaccaaggagcccgtctttatccccagaccaggcatcacctatgagccacccaactataaggccctggacttctccgaggccccaagcttcacccagcccctggtgaaccgctcggtcatcgcgggctacactgctatgctctgctgtgctgtccggggtagccccaagcccaagatttcctggttcaagaatggcctggacctgggagaagacgcccgcttccgcatgttcagcaagcagggagtgttgactctggagattagaaagccctgcccctttgacgggggcatctatgtctgcagggccaccaacttacagggcgaggcacggtgtgagtgccgcctggaggtgcgagtgcctcagtgagcggccgccaataaaggatcgtttattttcattggaagcgtgtgttggttttttgatcaggcgcgtccaagcttgcatgctggggagagatctgcggccgcaggaacccctagtgatggagttggccactccctctctgcgcgctcgctcgctcactgaggccgggcgaccaaaggtcgcccgacgcccgggctttgcccgggcggcctcagtgagcgagcgagcgcgcag

SEQ ID NO: 39 - DNA, 4806 bp, synthetic construct
  source 1..4806: mol_type = other DNA
ctcagtccattaggagccagtagcctggaagatgtctttacccccagcatcagttcaagtggagcagcacataactcttgccctctgccttccaagattctggtgctgagacttatggagtgtcttggaggttgccttctgccccccaaccctgctcccagctggccctcccaggcctgggttgctggcctctgctttatcaggattctcaagagggacagctggtttatgttgcatgactgttccctgcatatctgctctggttttaaatagcttatctgagcagctggaggaccacatgggcttatatggcgtggggtacatgttcctgtagccttgtccctggcacctgccaaaatagcagccaacaccccccacccccaccgccatccccctgccccacccgtcccctgtcgcacattcctccctccgcagggctggctcaccaggccccagcccacatgcctgcttaaagccctctccatcctctgcctcacccagtccccgctgagactgagcagacgcctccaggatctgtcggcagggtttagtgaaccgtcagatcctgcagaagttggtcgtgaggcactagtgggcaggtaagtatcaaggttacaagacaggtttaaggagaccaatagaaactgggcttgtcgagacagagaagactcttgcgtttctgataggcacctattggtcttactgacatccactttgcctttctctccacaggtgtactagtccgccaccatgcctgagcctggcaagaaacctgtgtctgccttcagcaaaaagcccagatctgtggaagtggctgctggcagccctgctgtgtttgaggctgagactgagagagctggggtcaaagtcagatggcagagaggaggctctgacatctctgccagcaacaaatatggcctggccacagagggcaccagacacaccctgacagtcagagaagtgggccctgctgaccagggcagctatgctgtgattgctggctccagcaaagtgaagtttgacctgaaagtgattgaggcagagaaggctgagcccatgctggcaccagctccagcaccagctgaagctactggtgctcctggggaagctcctgctcctgctgctgaactgggagagtctgccccatctcctaagggctctagctctgctgccctgaatggccctacacctggggctccagatgaccccattggcctgtttgtgatgaggccccaggatggggaagtgacagttggaggcagcatcaccttttctgccagagtggctggggccagcctgctgaaacctcctgtggtcaagtggttcaaaggcaaatgggttgacctgtcctccaaagtgggccagcacctccagctgcatgacagctatgatagggccagcaaggtgtacctgtttgagctgcacatcacagatgcccagccagccttcacaggcagctacagatgtgaagtgtccaccaaggacaagtttgactgcagcaacttcaacctgacagtgcatgaggccatgggcacaggggaccttgatctgctgtcagccttcagaagaaccagcctggctggtggtggcagaagaatctctgacagccatgaggacacaggcatcctggacttcagctccctgctgaagaagagagacagcttcagaacccctagggacagcaagctggaagccccagctgaggaagatgtctgggagatcctgagacaggcccctccatctgagtatgagagaattgccttccagtatggggtcacagacctgagaggcatgctgaagagactgaagggcatgagaagagatgagaagaagtccacagccttccagaaaaagctggaacctgcctaccaggtgtccaagggccacaagatcagactgacagtggaactggctgaccatgatgctgaagtgaagtggctcaagaatggccaagagatccaaatgtctggcagcaagtacatctttgagagcattggagccaagaggaccctgaccatcagccagtgtagcctggcagatgatgcagcctatcagtgtgttgttggtggagagaagtgcagcacagagctgtttgtcaaagaacctccagtgctgatcaccaggcctctggaagatcagctggtcatggttggacagagggttgagtttgagtgtgaagtctctgaagagggtgcccaagtgaaatggctgaaagatggggttgagctgaccagagaggaaaccttcaagtacaggttcaagaaggatggccagaggcaccacctgatcatcaatgaagccatgctggaagatgctggccactatgccctgtgcaccagtggtggacaagccctggctgagctgattgtgcaagagaagaaactggaagtgtaccagagcattgctgacctgatggttggagctaaggaccaggctgtgttcaagtgtgaagtgtcagatgagaatgtcagaggagtgtggttgaagaatgggaaagaactggtgcctgactccaggatcaaggtgtcccacattggcagagtgcacaagctgacaattgatgatgtgacccctgctgatgaggctgactacagctttgtgcctgagggctttgcctgcaacctgtctgccaagctgcactttatggaagtcaagattgactttgtgcccaggcaagagcctccaaagatccacctggattgccctggcagaatcccagacaccattgtggttgtggctggcaacaagctgaggctggatgtgcccatctctggggaccctgctcctacagtgatttggcagaaggccatcacacagggcaacaaggcccctgctagacctgcacctgatgctccagaggacactggggactctgatgagtgggtgtttgacaagaaactgctgtgtgaaactgagggcagagtcagagtggaaaccacaaaggacagatccatcttcacagtggaaggggctgagaaagaggatgaaggggtctacacagtgacagtgaagaaccctgtgggagaagatcaagtgaacctgactgtgaaagtcattgatgtgcctgatgcaccagcagctcccaagatcagcaatgttggagaggacagctgcacagtgcagtgggagcctccagcctatgatggtggacagcctatcctgggctacatcctggaaagaaagaagaaaaagtcctacagatggatgaggctcaactttgatctgatccaagagctgagccatgaagctagaaggatgattgaaggggttgtgtatgagatgagagtgtatgcagtgaatgccattggcatgagcagaccctctccagcctctcagccctttatgcctattggcccaccttctgagcccacacacctggcagtggaagatgtgtctgacaccacagtgtccctgaagtggaggccacctgagagagttggagctggaggcctggatggctactctgtggaatactgcccagagggctgctctgagtgggttgcagctctgcagggactgacagagcacacctccatcctggtcaaggatctgcctacaggggctagactgctgttcagagttagggcccacaacatggctggaccaggggctcctgtgaccacaacagaacctgtgactgtgcaagaaatcctgcagaggcccagactgcagctgcctagacatctgagacagaccatccagaagaaagttggggagcctgtgaacctgctgatcccattccaaggcaagcccagacctcaagtgacctggaccaaagagggacagcccctggctggggaagaagtctccatcagaaacagccccactgacaccatcctgttcatcagagctgccagaagagtgcattctggcacctaccaagtgactgttaggattgagaacatggaagataaggctaccctggtgctgcaggttgtggataagcctagtcctcctcaggacctcagagtcactgatgcctggggactgaatgtggccctggaatggaagcctccacaggatgtgggcaacactgagctgtggggctatacagtgcagaaggcagataagaaaaccatggaatggttcacagtgctggaacactatagaaggacccactgtgtggtgccagagctgatcattggcaatggctactacttcagggtgttcagccagaatatggttggattctctgatagggcagccactaccaaagaaccagtgttcatccccagacctggcatcacctatgagccacctaactacaaggccctggatttctctgaggcccctagcttcacccagcctctggtcaatagaagtgtgattgcagggtacactgccatgctgtgctgtgcagtcagaggcagccccaagcctaagatctcctggttcaaaaatggactggaccttggggaagatgccagattcagaatgttcagcaagcaaggggtgctgaccctggaaatcagaaagccctgtccttttgatggtggcatctatgtgtgtagagccaccaacctccagggagaagctagatgtgaatgcaggctggaagttagagtgcctcagtgagcggccgccaataaaggatcgtttattttcattggaagcgtgtgttggttttttgatcaggcgcgtccaagcttgcatgctggggagagatctgcggccgcaggaacccctagtgatggagttggccactccctctctgcgcgctcgctcgctcactgaggccgggcgaccaaaggtcgcccgacgcccgggctttgcccgggcggcctcagtgagcgagcgagcgcgcag

SEQ ID NO: 40 - DNA, 4980 bp, synthetic construct
  source 1..4980: mol_type = other DNA
ttggccactccctctctgcgcgctcgctcgctcactgaggccgcccgggcaaagcccgggcgtcgggcgacctttggtcgcccggcctcagtgagcgagcgagcgcgcagagagggagtggccaactccatcactaggggttcctgcggccgcacgcgtctcagtccattaggagccagtagcctggaagatgtctttacccccagcatcagttcaagtggagcagcacataactcttgccctctgccttccaagattctggtgctgagacttatggagtgtcttggaggttgccttctgccccccaaccctgctcccagctggccctcccaggcctgggttgctggcctctgctttatcaggattctcaagagggacagctggtttatgttgcatgactgttccctgcatatctgctctggttttaaatagcttatctgagcagctggaggaccacatgggcttatatggcgtggggtacatgttcctgtagccttgtccctggcacctgccaaaatagcagccaacaccccccacccccaccgccatccccctgccccacccgtcccctgtcgcacattcctccctccgcagggctggctcaccaggccccagcccacatgcctgcttaaagccctctccatcctctgcctcacccagtccccgctgagactgagcagacgcctccaggatctgtcggcagggtttagtgaaccgtcagatcctgcagaagttggtcgtgaggcactagtgggcaggtaagtatcaaggttacaagacaggtttaaggagaccaatagaaactgggcttgtcgagacagagaagactcttgcgtttctgataggcacctattggtcttactgacatccactttgcctttctctccacaggtgtactagtccgccaccatgcctgagcctggcaagaaacctgtgtctgccttcagcaaaaagcccagatctgtggaagtggctgctggcagccctgctgtgtttgaggctgagactgagagagctggggtcaaagtcagatggcagagaggaggctctgacatctctgccagcaacaaatatggcctggccacagagggcaccagacacaccctgacagtcagagaagtgggccctgctgaccagggcagctatgctgtgattgctggctccagcaaagtgaagtttgacctgaaagtgattgaggcagagaaggctgagcccatgctggcaccagctccagcaccagctgaagctactggtgctcctggggaagctcctgctcctgctgctgaactgggagagtctgccccatctcctaagggctctagctctgctgccctgaatggccctacacctggggctccagatgaccccattggcctgtttgtgatgaggccccaggatggggaagtgacagttggaggcagcatcaccttttctgccagagtggctggggccagcctgctgaaacctcctgtggtcaagtggttcaaaggcaaatgggttgacctgtcctccaaagtgggccagcacctccagctgcatgacagctatgatagggccagcaaggtgtacctgtttgagctgcacatcacagatgcccagccagccttcacaggcagctacagatgtgaagtgtccaccaaggacaagtttgactgcagcaacttcaacctgacagtgcatgaggccatgggcacaggggaccttgatctgctgtcagccttcagaagaaccagcctggctggtggtggcagaagaatctctgacagccatgaggacacaggcatcctggacttcagctccctgctgaagaagagagacagcttcagaacccctagggacagcaagctggaagccccagctgaggaagatgtctgggagatcctgagacaggcccctccatctgagtatgagagaattgccttccagtatggggtcacagacctgagaggcatgctgaagagactgaagggcatgagaagagatgagaagaagtccacagccttccagaaaaagctggaacctgcctaccaggtgtccaagggccacaagatcagactgacagtggaactggctgaccatgatgctgaagtgaagtggctcaagaatggccaagagatccaaatgtctggcagcaagtacatctttgagagcattggagccaagaggaccctgaccatcagccagtgtagcctggcagatgatgcagcctatcagtgtgttgttggtggagagaagtgcagcacagagctgtttgtcaaagaacctccagtgctgatcaccaggcctctggaagatcagctggtcatggttggacagagggttgagtttgagtgtgaagtctctgaagagggtgcccaagtgaaatggctgaaagatggggttgagctgaccagagaggaaaccttcaagtacaggttcaagaaggatggccagaggcaccacctgatcatcaatgaagccatgctggaagatgctggccactatgccctgtgcaccagtggtggacaagccctggctgagctgattgtgcaagagaagaaactggaagtgtaccagagcattgctgacctgatggttggagctaaggaccaggctgtgttcaagtgtgaagtgtcagatgagaatgtcagaggagtgtggttgaagaatgggaaagaactggtgcctgactccaggatcaaggtgtcccacattggcagagtgcacaagctgacaattgatgatgtgacccctgctgatgaggctgactacagctttgtgcctgagggctttgcctgcaacctgtctgccaagctgcactttatggaagtcaagattgactttgtgcccaggcaagagcctccaaagatccacctggattgccctggcagaatcccagacaccattgtggttgtggctggcaacaagctgaggctggatgtgcccatctctggggaccctgctcctacagtgatttggcagaaggccatcacacagggcaacaaggcccctgctagacctgcacctgatgctccagaggacactggggactctgatgagtgggtgtttgacaagaaactgctgtgtgaaactgagggcagagtcagagtggaaaccacaaaggacagatccatcttcacagtggaaggggctgagaaagaggatgaaggggtctacacagtgacagtgaagaaccctgtgggagaagatcaagtgaacctgactgtgaaagtcattgatgtgcctgatgcaccagcagctcccaagatcagcaatgttggagaggacagctgcacagtgcagtgggagcctccagcctatgatggtggacagcctatcctgggctacatcctggaaagaaagaagaaaaagtcctacagatggatgaggctcaactttgatctgatccaagagctgagccatgaagctagaaggatgattgaaggggttgtgtatgagatgagagtgtatgcagtgaatgccattggcatgagcagaccctctccagcctctcagccctttatgcctattggcccaccttctgagcccacacacctggcagtggaagatgtgtctgacaccacagtgtccctgaagtggaggccacctgagagagttggagctggaggcctggatggctactctgtggaatactgcccagagggctgctctgagtgggttgcagctctgcagggactgacagagcacacctccatcctggtcaaggatctgcctacaggggctagactgctgttcagagttagggcccacaacatggctggaccaggggctcctgtgaccacaacagaacctgtgactgtgcaagaaatcctgcagaggcccagactgcagctgcctagacatctgagacagaccatccagaagaaagttggggagcctgtgaacctgctgatcccattccaaggcaagcccagacctcaagtgacctggaccaaagagggacagcccctggctggggaagaagtctccatcagaaacagccccactgacaccatcctgttcatcagagctgccagaagagtgcattctggcacctaccaagtgactgttaggattgagaacatggaagataaggctaccctggtgctgcaggttgtggataagcctagtcctcctcaggacctcagagtcactgatgcctggggactgaatgtggccctggaatggaagcctccacaggatgtgggcaacactgagctgtggggctatacagtgcagaaggcagataagaaaaccatggaatggttcacagtgctggaacactatagaaggacccactgtgtggtgccagagctgatcattggcaatggctactacttcagggtgttcagccagaatatggttggattctctgatagggcagccactaccaaagaaccagtgttcatccccagacctggcatcacctatgagccacctaactacaaggccctggatttctctgaggcccctagcttcacccagcctctggtcaatagaagtgtgattgcagggtacactgccatgctgtgctgtgcagtcagaggcagccccaagcctaagatctcctggttcaaaaatggactggaccttggggaagatgccagattcagaatgttcagcaagcaaggggtgctgaccctggaaatcagaaagccctgtccttttgatggtggcatctatgtgtgtagagccaccaacctccagggagaagctagatgtgaatgcaggctggaagttagagtgcctcagtgagcggccgccaataaaggatcgtttattttcattggaagcgtgtgttggttttttgatcaggcgcgtccaagcttgcatgctggggagagatctgcggccgcaggaacccctagtgatggagttggccactccctctctgcgcgctcgctcgctcactgaggccgggcgaccaaaggtcgcccgacgcccgggctttgcccgggcggcctcagtgagcgagcgagcgcgcagagagggagtggccaa

SEQ ID NO: 41 - DNA, 4950 bp, synthetic construct
  source 1..4950: mol_type = other DNA
ctgcgcgctcgctcgctcactgaggccgcccgggcaaagcccgggcgtcgggcgacctttggtcgcccggcctcagtgagcgagcgagcgcgcagagagggagtggccaactccatcactaggggttcctgcggccgcacgcgtctcagtccattaggagccagtagcctggaagatgtctttacccccagcatcagttcaagtggagcagcacataactcttgccctctgccttccaagattctggtgctgagacttatggagtgtcttggaggttgccttctgccccccaaccctgctcccagctggccctcccaggcctgggttgctggcctctgctttatcaggattctcaagagggacagctggtttatgttgcatgactgttccctgcatatctgctctggttttaaatagcttatctgagcagctggaggaccacatgggcttatatggcgtggggtacatgttcctgtagccttgtccctggcacctgccaaaatagcagccaacaccccccacccccaccgccatccccctgccccacccgtcccctgtcgcacattcctccctccgcagggctggctcaccaggccccagcccacatgcctgcttaaagccctctccatcctctgcctcacccagtccccgctgagactgagcagacgcctccaggatctgtcggcagggtttagtgaaccgtcagatcctgcagaagttggtcgtgaggcactagtgggcaggtaagtatcaaggttacaagacaggtttaaggagaccaatagaaactgggcttgtcgagacagagaagactcttgcgtttctgataggcacctattggtcttactgacatccactttgcctttctctccacaggtgtactagtccgccaccatgcctgagcctggcaagaaacctgtgtctgccttcagcaaaaagcccagatctgtggaagtggctgctggcagccctgctgtgtttgaggctgagactgagagagctggggtcaaagtcagatggcagagaggaggctctgacatctctgccagcaacaaatatggcctggccacagagggcaccagacacaccctgacagtcagagaagtgggccctgctgaccagggcagctatgctgtgattgctggctccagcaaagtgaagtttgacctgaaagtgattgaggcagagaaggctgagcccatgctggcaccagctccagcaccagctgaagctactggtgctcctggggaagctcctgctcctgctgctgaactgggagagtctgccccatctcctaagggctctagctctgctgccctgaatggccctacacctggggctccagatgaccccattggcctgtttgtgatgaggccccaggatggggaagtgacagttggaggcagcatcaccttttctgccagagtggctggggccagcctgctgaaacctcctgtggtcaagtggttcaaaggcaaatgggttgacctgtcctccaaagtgggccagcacctccagctgcatgacagctatgatagggccagcaaggtgtacctgtttgagctgcacatcacagatgcccagccagccttcacaggcagctacagatgtgaagtgtccaccaaggacaagtttgactgcagcaacttcaacctgacagtgcatgaggccatgggcacaggggaccttgatctgctgtcagccttcagaagaaccagcctggctggtggtggcagaagaatctctgacagccatgaggacacaggcatcctggacttcagctccctgctgaagaagagagacagcttcagaacccctagggacagcaagctggaagccccagctgaggaagatgtctgggagatcctgagacaggcccctccatctgagtatgagagaattgccttccagtatggggtcacagacctgagaggcatgctgaagagactgaagggcatgagaagagatgagaagaagtccacagccttccagaaaaagctggaacctgcctaccaggtgtccaagggccacaagatcagactgacagtggaactggctgaccatgatgctgaagtgaagtggctcaagaatggccaagagatccaaatgtctggcagcaagtacatctttgagagcattggagccaagaggaccctgaccatcagccagtgtagcctggcagatgatgcagcctatcagtgtgttgttggtggagagaagtgcagcacagagctgtttgtcaaagaacctccagtgctgatcaccaggcctctggaagatcagctggtcatggttggacagagggttgagtttgagtgtgaagtctctgaagagggtgcccaagtgaaatggctgaaagatggggttgagctgaccagagaggaaaccttcaagtacaggttcaagaaggatggccagaggcaccacctgatcatcaatgaagccatgctggaagatgctggccactatgccctgtgcaccagtggtggacaagccctggctgagctgattgtgcaagagaagaaactggaagtgtaccagagcattgctgacctgatggttggagctaaggaccaggctgtgttcaagtgtgaagtgtcagatgagaatgtcagaggagtgtggttgaagaatgggaaagaactggtgcctgactccaggatcaaggtgtcccacattggcagagtgcacaagctgacaattgatgatgtgacccctgctgatgaggctgactacagctttgtgcctgagggctttgcctgcaacctgtctgccaagctgcactttatggaagtcaagattgactttgtgcccaggcaagagcctccaaagatccacctggattgccctggcagaatcccagacaccattgtggttgtggctggcaacaagctgaggctggatgtgcccatctctggggaccctgctcctacagtgatttggcagaaggccatcacacagggcaacaaggcccctgctagacctgcacctgatgctccagaggacactggggactctgatgagtgggtgtttgacaagaaactgctgtgtgaaactgagggcagagtcagagtggaaaccacaaaggacagatccatcttcacagtggaaggggctgagaaagaggatgaaggggtctacacagtgacagtgaagaaccctgtgggagaagatcaagtgaacctgactgtgaaagtcattgatgtgcctgatgcaccagcagctcccaagatcagcaatgttggagaggacagctgcacagtgcagtgggagcctccagcctatgatggtggacagcctatcctgggctacatcctggaaagaaagaagaaaaagtcctacagatggatgaggctcaactttgatctgatccaagagctgagccatgaagctagaaggatgattgaaggggttgtgtatgagatgagagtgtatgcagtgaatgccattggcatgagcagaccctctccagcctctcagccctttatgcctattggcccaccttctgagcccacacacctggcagtggaagatgtgtctgacaccacagtgtccctgaagtggaggccacctgagagagttggagctggaggcctggatggctactctgtggaatactgcccagagggctgctctgagtgggttgcagctctgcagggactgacagagcacacctccatcctggtcaaggatctgcctacaggggctagactgctgttcagagttagggcccacaacatggctggaccaggggctcctgtgaccacaacagaacctgtgactgtgcaagaaatcctgcagaggcccagactgcagctgcctagacatctgagacagaccatccagaagaaagttggggagcctgtgaacctgctgatcccattccaaggcaagcccagacctcaagtgacctggaccaaagagggacagcccctggctggggaagaagtctccatcagaaacagccccactgacaccatcctgttcatcagagctgccagaagagtgcattctggcacctaccaagtgactgttaggattgagaacatggaagataaggctaccctggtgctgcaggttgtggataagcctagtcctcctcaggacctcagagtcactgatgcctggggactgaatgtggccctggaatggaagcctccacaggatgtgggcaacactgagctgtggggctatacagtgcagaaggcagataagaaaaccatggaatggttcacagtgctggaacactatagaaggacccactgtgtggtgccagagctgatcattggcaatggctactacttcagggtgttcagccagaatatggttggattctctgatagggcagccactaccaaagaaccagtgttcatccccagacctggcatcacctatgagccacctaactacaaggccctggatttctctgaggcccctagcttcacccagcctctggtcaatagaagtgtgattgcagggtacactgccatgctgtgctgtgcagtcagaggcagccccaagcctaagatctcctggttcaaaaatggactggaccttggggaagatgccagattcagaatgttcagcaagcaaggggtgctgaccctggaaatcagaaagccctgtccttttgatggtggcatctatgtgtgtagagccaccaacctccagggagaagctagatgtgaatgcaggctggaagttagagtgcctcagtgagcggccgccaataaaggatcgtttattttcattggaagcgtgtgttggttttttgatcaggcgcgtccaagcttgcatgctggggagagatctgcggccgcaggaacccctagtgatggagttggccactccctctctgcgcgctcgctcgctcactgaggccgggcgaccaaaggtcgcccgacgcccgggctttgcccgggcggcctcagtgagcgagcgagcgcgcag

SEQ ID NO: 42 - DNA, 3825 bp, Homo sapiens
  source 1..3825: mol_type = genomic DNA
atgcctgagccggggaagaagccagtctcagcttttagcaagaagccacggtcagtggaagtggccgcaggcagccctgccgtgttcgaggccgagacagagcgggcaggagtgaaggtgcgctggcagcgcggaggcagtgacatcagcgccagcaacaagtacggcctggccacagagggcacacggcatacgctgacagtgcgggaagtgggccctgccgaccagggatcttacgcagtcattgctggctcctccaaggtcaagttcgacctcaaggtcatagaggcagagaaggcagagcccatgctggcccctgcccctgcccctgctgaggccactggagcccctggagaagccccggccccagccgctgagctgggagaaagtgccccaagtcccaaagggtcaagctcagcagctctcaatggtcctacccctggagcccccgatgaccccattggcctcttcgtgatgcggccacaggatggcgaggtgaccgtgggtggcagcatcaccttctcagcccgcgtggccggcgccagcctcctgaagccgcctgtggtcaagtggttcaagggcaaatgggtggacctgagcagcaaggtgggccagcacctgcagctgcacgacagctacgaccgcgccagcaaggtctatctgttcgagctgcacatcaccgatgcccagcctgccttcactggcagctaccgctgtgaggtgtccaccaaggacaaatttgactgctccaacttcaatctcactgtccacgaggccatgggcaccggagacctggacctcctatcagccttccgccgcacgagcctggctggaggtggtcggcggatcagtgatagccatgaggacactgggattctggacttcagctcactgctgaaaaagagagacagtttccggaccccgagggactcgaagctggaggcaccagcagaggaggacgtgtgggagatcctacggcaggcacccccatctgagtacgagcgcatcgccttccagtacggcgtcactgacctgcgcggcatgctaaagaggctcaagggcatgaggcgcgatgagaagaagagcacagcctttcagaagaagctggagccggcctaccaggtgagcaaaggccacaagatccggctgaccgtggaactggctgaccatgacgctgaggtcaaatggctcaagaatggccaggagatccagatgagcggcagcaagtacatctttgagtccatcggtgccaagcgtaccctgaccatcagccagtgctcattggcggacgacgcagcctaccagtgcgtggtgggtggcgagaagtgtagcacggagctctttgtgaaagagccccctgtgctcatcacgcgccccttggaggaccagctggtgatggtggggcagcgggtggagtttgagtgtgaagtatcggaggagggggcgcaagtcaaatggctgaaggacggggtggagctgacccgggaggagaccttcaaataccggttcaagaaggacgggcagagacaccacctgatcatcaacgaggccatgctggaggacgcggggcactatgcactgtgcactagcgggggccaggcgctggctgagctcattgtgcaggaaaagaagctggaggtgtaccagagcatcgcagacctgatggtgggcgcaaaggaccaggcggtgttcaaatgtgaggtctcagatgagaatgttcggggtgtgtggctgaagaatgggaaggagctggtgcccgacagccgcataaaggtgtcccacatcgggcgggtccacaaactgaccattgacgacgtcacacctgccgacgaggctgactacagctttgtgcccgagggcttcgcctgcaacctgtcagccaagctccacttcatggaggtcaagattgacttcgtacccaggcaggaacctcccaagatccacctggactgcccaggccgcataccagacaccattgtggttgtagctggaaataagctacgtctggacgtccctatctctggggaccctgctcccactgtgatctggcagaaggctatcacgcaggggaataaggccccagccaggccagccccagatgccccagaggacacaggtgacagcgatgagtgggtgtttgacaagaagctgctgtgtgagaccgagggccgggtccgcgtggagaccaccaaggaccgcagcatcttcacggtcgagggggcagagaaggaagatgagggcgtctacacggtcacagtgaagaaccctgtgggcgaggaccaggtcaacctcacagtcaaggtcatcgacgtgccagacgcacctgcggcccccaagatcagcaacgtgggagaggactcctgcacagtacagtgggagccgcctgcctacgatggcgggcagcccatcctgggctacatcctggagcgcaagaagaagaagagctaccggtggatgcggctgaacttcgacctgattcaggagctgagtcatgaagcgcggcgcatgatcgagggcgtggtgtacgagatgcgcgtctacgcggtcaacgccatcggcatgtccaggcccagccctgcctcccagcccttcatgcctatcggtccccccagcgaacccacccacctggcagtagaggacgtctctgacaccacggtctccctcaagtggcggcccccagagcgcgtgggagcaggaggcctggatggctacagcgtggagtactgcccagagggctgctcagagtgggtggctgccctgcaggggctgacagagcacacatcgatactggtgaaggacctgcccacgggggcccggctgcttttccgagtgcgggcacacaatatggcagggcctggagcccctgttaccaccacggagccggtgacagtgcaggagatcctgcaacggccacggcttcagctgcccaggcacctgcgccagaccattcagaagaaggtcggggagcctgtgaaccttctcatccctttccagggcaagccccggcctcaggtgacctggaccaaagaggggcagcccctggcaggcgaggaggtgagcatccgcaacagccccacagacaccatcctgttcatccgggccgctcgccgcgtgcattcaggcacttaccaggtgacggtgcgcattgagaacatggaggacaaggccacgctggtgctgcaggttgttgacaagccaagtcctccccaggatctccgggtgactgacgcctggggtcttaatgtggctctggagtggaagccaccccaggatgtcggcaacacggagctctgggggtacacagtgcagaaagccgacaagaagaccatggagtggttcaccgtcttggagcattaccgccgcacccactgcgtggtgccagagctcatcattggcaatggctactacttccgcgtcttcagccagaatatggttggctttagtgacagagcggccaccaccaaggagcccgtctttatccccagaccaggcatcacctatgagccacccaactataaggccctggacttctccgaggccccaagcttcacccagcccctggtgaaccgctcggtcatcgcgggctacactgctatgctctgctgtgctgtccggggtagccccaagcccaagatttcctggttcaagaatggcctggacctgggagaagacgcccgcttccgcatgttcagcaagcagggagtgttgactctggagattagaaagccctgcccctttgacgggggcatctatgtctgcagggccaccaacttacagggcgaggcacggtgtgagtgccgcctggaggtgcgagtgcctcagtga

SEQ ID NO: 43 - DNA, 3825 bp, Homo sapiens
  source 1..3825: mol_type = genomic DNA
atgcctgagccggggaagaagccagtctcagcttttagcaagaagccacggtcagtggaagtggccgcaggcagccctgccgtgttcgaggccgagacagagcgggcaggagtgaaggtgcgctggcagcgcggaggcagtgacatcagcgccagcaacaagtacggcctggccacagagggcacacggcatacgctgacagtgcgggaagtgggccctgccgaccagggatcttacgcagtcattgctggctcctccaaggtcaagttcgacctcaaggtcatagaggcagagaaggcagagcccatgctggcccctgcccctgcccctgctgaggccactggagcccctggagaagccccggccccagccgctgagctgggagaaagtgccccaagtcccaaagggtcaagctcagcagctctcaatggtcctacccctggagcccccgatgaccccattggcctcttcgtgatgcggccacaggatggcgaggtgaccgtgggtggcagcatcaccttctcagcccgcgtggccggcgccagcctcctgaagccgcctgtggtcaagtggttcaagggcaaatgggtggacctgagcagcaaggtgggccagcacctgcagctgcacgacagctacgaccgcgccagcaaggtctatctgttcgagctgcacatcaccgatgcccagcctgccttcactggcagctaccgctgtgaggtgtccaccaaggacaaatttgactgctccaacttcaatctcactgtccacgaggccatgggcaccggagacctggacctcctatcagccttccgccgcacgagcctggctggaggtggtcggcggatcagtgatagccatgaggacactgggattctggacttcagctcactgctgaaaaagagagacagtttccggaccccgagggactcgaagctggaggcaccagcagaggaggacgtgtgggagatcctacggcaggcacccccatctgagtacgagcgcatcgccttccagtacggcgtcactgacctgcgcggcatgctaaagaggctcaagggcatgaggcgcgatgagaagaagagcacagcctttcagaagaagctggagccggcctaccaggtgagcaaaggccacaagatccggctgaccgtggaactggctgaccatgacgctgaggtcaaatggctcaagaatggccaggagatccagatgagcggcagcaagtacatctttgagtccatcggtgccaagcgtaccctgaccatcagccagtgctcattggcggacgacgcagcctaccagtgcgtggtgggtggcgagaagtgtagcacggagctctttgtgaaagagccccctgtgctcatcacgcgccccttggaggaccagctggtgatggtggggcagcgggtggagtttgagtgtgaagtatcggaggagggggcgcaagtcaaatggctgaaggacggggtggagctgacccgggaggagaccttcaaataccggttcaagaaggacgggcagagacaccacctgatcatcaacgaggccatgctggaggacgcggggcactatgcactgtgcactagcgggggccaggcgctggctgagctcattgtgcaggaaaagaagctggaggtgtaccagagcatcgcagacctgatggtgggcgcaaaggaccaggcggtgttcaaatgtgaggtctcagatgagaatgttcggggtgtgtggctgaagaatgggaaggagctggtgcccgacagccgcataaaggtgtcccacatcgggcgggtccacaaactgaccattgacgacgtcacacctgccgacgaggctgactacagctttgtgcccgagggcttcgcctgcaacctgtcagccaagctccacttcatggaggtcaagattgacttcgtacccaggcaggaacctcccaagatccacctggactgcccaggccgcataccagacaccattgtggttgtagctggaaataagctacgtctggacgtccctatctctggggaccctgctcccactgtgatctggcagaaggctatcacgcaggggaataaggccccagccaggccagccccagatgccccagaggacacaggtgacagcgatgagtgggtgtttgacaagaagctgctgtgtgagaccgagggccgggtccgcgtggagaccaccaaggaccgcagcatcttcacggtcgagggggcagagaaggaagatgagggcgtctacacggtcacagtgaagaaccctgtgggcgaggaccaggtcaacctcacagtcaaggtcatcgacgtgccagacgcacctgcggcccccaagatcagcaacgtgggagaggactcctgcacagtacagtgggagccgcctgcctacgatggcgggcagcccatcctgggctacatcctggagcgcaagaagaagaagagctaccggtggatgcggctgaacttcgacctgattcaggagctgagtcatgaagcgcggcgcatgatcgagggcgtggtgtacgagatgcgcgtctacgcggtcaacgccatcggcatgtccaggcccagccctgcctcccagcccttcatgcctatcggtccccccagcgaacccacccacctggcagtagaggacgtctctgacaccacggtctccctcaagtggcggcccccagagcgcgtgggagcaggaggcctggatggctacagcgtggagtactgcccagagggctgctcagagtgggtggctgccctgcaggggctgacagagcacacatcgatactggtgaaggacctgcccacgggggcccggctgcttttccgagtgcgggcacacaatatggcagggcctggagcccctgttaccaccacggagccggtgacagtgcaggagatcctgcaacggccacggcttcagctgcccaggcacctgcgccagaccattcagaagaaggtcggggagcctgtgaaccttctcatccctttccagggcaagccccggcctcaggtgacctggaccaaagaggggcagcccctggcaggcgaggaggtgagcatccgcaacagccccacagacaccatcctgttcatccgggccgctcgccgcgtgcattcaggcacttaccaggtgacggtgcgcattgagaacatggaggacaaggccacgctggtgctgcaggttgttgacaagccaagtcctccccaggatctccgggtgactgacgcctggggtcttaatgtggctctggagtggaagccaccccaggatgtcggcaacacggaactctgggggtacacagtgcagaaagccgacaagaagaccatggagtggttcaccgtcttggagcattaccgccgcacccactgcgtggtgccagagctcatcattggcaatggctactacttccgcgtcttcagccagaatatggttggctttagtgacagagcggccaccaccaaggagcccgtctttatccccagaccaggcatcacctatgagccacccaactataaggccctggacttctccgaggccccaagcttcacccagcccctggtgaaccgctcggtcatcgcgggctacactgctatgctctgctgtgctgtccggggtagccccaagcccaagatttcctggttcaagaatggcctggacctgggagaagacgcccgcttccgcatgttcagcaagcagggagtgttgactctggagattagaaagccctgcccctttgacgggggcatctatgtctgcagggccaccaacttacagggcgaggcacggtgtgagtgccgcctggaggtgcgagtgcctcagtga

SEQ ID NO: 44 - DNA, 3825 bp, synthetic construct
  source 1..3825: mol_type = other DNA
atgcctgagcctggaaagaaacctgtgtccgccttcagcaagaagcccagatccgttgaagtggccgctggaagccctgccgtgtttgaggccgaaacagaacgcgctggcgtgaaagttcgatggcagagaggcggcagcgatatcagcgccagcaacaaatatggcctggccaccgagggcaccagacacacactgacagtcagagaagtgggccctgccgatcagggctcttatgccgtgattgccggcagcagcaaagtgaagttcgacctgaaagtgatcgaggccgagaaggccgagcctatgcttgctcctgctccagctcctgctgaagctacaggtgctcctggcgaagctccagcaccagctgctgaactgggagagtctgccccatctcctaagggctctagcagcgccgctctgaatggacctacacctggcgctcccgatgatcccatcggcctgtttgttatgaggccccaggatggcgaagtgacagtcggcggcagcatcacctttagcgctagagttgcaggcgccagcctgctgaaacctcctgtggtcaagtggttcaaaggcaaatgggtcgacctgtcctccaaagtgggccagcatctgcagctccacgacagctacgatagagccagcaaggtgtacctgttcgagctgcacatcacagacgcccagccagcctttaccggcagctacagatgtgaagtgtccaccaaggacaagttcgactgcagcaacttcaacctgaccgtgcacgaggccatgggcacaggcgatctggatctgctgagcgcctttcggagaacatctctggctggcggcggaagaagaatcagcgacagccacgaggataccggcatcctggatttcagcagcctgctcaagaagcgggacagcttcagaacccctcgggacagcaaactggaagctcccgccgaggaagatgtctgggagatcctgagacaggcccctcctagcgagtacgagagaatcgcctttcagtacggcgtgaccgacctgagaggcatgctgaagaggctgaagggcatgcgccgggacgagaagaagtccacagccttccagaagaagctggaacccgcctaccaggtgtccaagggccacaagatcagactgaccgtggaactggccgaccacgacgccgaagtgaagtggctgaaaaacggccaagagattcagatgagcggcagcaagtacatcttcgagagcatcggcgccaagcggaccctgacaatcagccagtgtagcctggccgatgacgccgcctatcagtgtgttgttggcggcgagaagtgcagcaccgagctgttcgtgaaagaacctccagtgctgatcacccggcctctggaagatcagctggtcatggtcggacagcgcgtggaattcgagtgcgaggtttccgaagagggcgcccaagtcaaatggctgaaggatggcgtcgagctgaccagagaggaaaccttcaagtaccggttcaagaaggacggccagcggcaccacctgatcatcaatgaagccatgctggaagatgccggccactacgccttgtgtacatctggtggacaggccctggccgagctgattgtgcaagagaagaaactcgaggtgtaccagtctatcgccgacctgatggtcggagccaaagaccaggccgtgttcaagtgcgaagtgtccgacgagaatgtgcgcggcgtgtggctcaagaacggcaaagaactggtgcccgacagccggatcaaggtgtcccacattggcagagtgcacaagctgaccatcgacgacgtgacccctgctgacgaggccgattacagctttgtgcctgagggcttcgcctgtaacctgagcgccaagctgcactttatggaagtcaagatcgacttcgtgccccggcaagagcctcctaagatccacctggattgccctggcagaatccccgacacaatcgtggtggtggccggaaacaagctgagactggatgtgcccatcagcggcgatcctgctcctacagtgatctggcagaaggccatcacacagggcaacaaggcccctgctagacccgctcctgatgctcctgaagataccggcgatagcgacgagtgggtgttcgacaagaaactgctgtgcgagacagagggaagagtgcgagtggaaaccacaaaggaccgcagcatcttcaccgtggaaggcgccgagaaagaggacgagggcgtctacacagtgaccgtgaagaatcccgtgggcgaagatcaagtgaacctgacagtgaaagtcatcgacgtgcccgacgctcctgccgctccaaagatctctaacgtgggagaagatagctgcaccgtgcagtgggagcctccagcttatgatggcggacagcctatcctgggctacatcctggaacgcaagaagaaaaagtcctaccggtggatgcggctgaacttcgatctgatccaagagctgagccacgaagccagacggatgatcgaaggcgtggtgtacgagatgagagtgtacgccgtgaacgccatcggcatgagcagaccttctccagcctctcagcccttcatgcctatcggccctccaagcgaacctacacacctggccgttgaggacgtgtccgataccaccgtgtctctgaaatggcggcctcctgagagagttggagctggcggactggatggctacagcgtggaatactgtccagagggctgtagcgagtgggttgcagctctgcagggactgaccgagcacacctctatcctggtcaaggacctgcctaccggcgctagactgctgtttagagtgcgggcccacaacatggctggaccaggtgcaccagtgaccaccacagaacccgtgacagtgcaagaaatcctgcagcggccaagactgcagctgcccagacacctgaggcagaccatccagaaaaaagtgggcgagcccgtgaacctgctgatcccatttcaaggcaagcccagacctcaagtgacctggaccaaagagggacagcctctggccggcgaagaggtgtccatcagaaacagccccaccgacaccatcctgttcatcagagccgccagaagggtgcactccggcacctatcaagtgactgtgcggatcgagaacatggaagataaggccacactggtgctgcaggtcgtggacaaacccagtcctcctcaggacctgcgcgtgacagatgcctggggactgaatgtggctctggaatggaagcctccacaggacgtgggcaacacagagctgtggggctataccgtgcagaaagccgacaaaaagaccatggaatggttcaccgtgctggaacactaccggcggacccattgtgtggtgcctgagctgatcatcggcaacggctactacttccgggtgttcagccagaatatggtcggattcagcgatagggccgccaccacaaaagaaccagtgttcatccccagacctggcatcacctacgagcctccaaactacaaggccctggacttcagcgaggcccctagctttacacagcccctggtcaacagaagcgtgatcgccggctacaccgccatgctgtgttgtgccgttagaggcagccccaagcctaagatctcctggtttaagaacggcctggacctcggcgaggacgccagattcagaatgttcagcaagcagggcgtgctgaccctggaaatcagaaagccctgtcctttcgacggcggcatctacgtgtgcagagccaccaatctgcagggcgaagctagatgcgagtgcagactggaagttcgggtgccccagtaa

SEQ ID NO: 45 - DNA, 3825 bp, synthetic construct
  source 1..3825: mol_type = other DNA
atgcctgagcctggcaagaaacctgtgtctgccttcagcaaaaagcccagatctgtggaagtggctgctggcagccctgctgtgtttgaggctgagactgagagagctggggtcaaagtcagatggcagagaggaggctctgacatctctgccagcaacaaatatggcctggccacagagggcaccagacacaccctgacagtcagagaagtgggccctgctgaccagggcagctatgctgtgattgctggctccagcaaagtgaagtttgacctgaaagtgattgaggcagagaaggctgagcccatgctggcaccagctccagcaccagctgaagctactggtgctcctggggaagctcctgctcctgctgctgaactgggagagtctgccccatctcctaagggctctagctctgctgccctgaatggccctacacctggggctccagatgaccccattggcctgtttgtgatgaggccccaggatggggaagtgacagttggaggcagcatcaccttttctgccagagtggctggggccagcctgctgaaacctcctgtggtcaagtggttcaaaggcaaatgggttgacctgtcctccaaagtgggccagcacctccagctgcatgacagctatgatagggccagcaaggtgtacctgtttgagctgcacatcacagatgcccagccagccttcacaggcagctacagatgtgaagtgtccaccaaggacaagtttgactgcagcaacttcaacctgacagtgcatgaggccatgggcacaggggaccttgatctgctgtcagccttcagaagaaccagcctggctggtggtggcagaagaatctctgacagccatgaggacacaggcatcctggacttcagctccctgctgaagaagagagacagcttcagaacccctagggacagcaagctggaagccccagctgaggaagatgtctgggagatcctgagacaggcccctccatctgagtatgagagaattgccttccagtatggggtcacagacctgagaggcatgctgaagagactgaagggcatgagaagagatgagaagaagtccacagccttccagaaaaagctggaacctgcctaccaggtgtccaagggccacaagatcagactgacagtggaactggctgaccatgatgctgaagtgaagtggctcaagaatggccaagagatccaaatgtctggcagcaagtacatctttgagagcattggagccaagaggaccctgaccatcagccagtgtagcctggcagatgatgcagcctatcagtgtgttgttggtggagagaagtgcagcacagagctgtttgtcaaagaacctccagtgctgatcaccaggcctctggaagatcagctggtcatggttggacagagggttgagtttgagtgtgaagtctctgaagagggtgcccaagtgaaatggctgaaagatggggttgagctgaccagagaggaaaccttcaagtacaggttcaagaaggatggccagaggcaccacctgatcatcaatgaagccatgctggaagatgctggccactatgccctgtgcaccagtggtggacaagccctggctgagctgattgtgcaagagaagaaactggaagtgtaccagagcattgctgacctgatggttggagctaaggaccaggctgtgttcaagtgtgaagtgtcagatgagaatgtcagaggagtgtggttgaagaatgggaaagaactggtgcctgactccaggatcaaggtgtcccacattggcagagtgcacaagctgacaattgatgatgtgacccctgctgatgaggctgactacagctttgtgcctgagggctttgcctgcaacctgtctgccaagctgcactttatggaagtcaagattgactttgtgcccaggcaagagcctccaaagatccacctggattgccctggcagaatcccagacaccattgtggttgtggctggcaacaagctgaggctggatgtgcccatctctggggaccctgctcctacagtgatttggcagaaggccatcacacagggcaacaaggcccctgctagacctgcacctgatgctccagaggacactggggactctgatgagtgggtgtttgacaagaaactgctgtgtgaaactgagggcagagtcagagtggaaaccacaaaggacagatccatcttcacagtggaaggggctgagaaagaggatgaaggggtctacacagtgacagtgaagaaccctgtgggagaagatcaagtgaacctgactgtgaaagtcattgatgtgcctgatgcaccagcagctcccaagatcagcaatgttggagaggacagctgcacagtgcagtgggagcctccagcctatgatggtggacagcctatcctgggctacatcctggaaagaaagaagaaaaagtcctacagatggatgaggctcaactttgatctgatccaagagctgagccatgaagctagaaggatgattgaaggggttgtgtatgagatgagagtgtatgcagtgaatgccattggcatgagcagaccctctccagcctctcagccctttatgcctattggcccaccttctgagcccacacacctggcagtggaagatgtgtctgacaccacagtgtccctgaagtggaggccacctgagagagttggagctggaggcctggatggctactctgtggaatactgcccagagggctgctctgagtgggttgcagctctgcagggactgacagagcacacctccatcctggtcaaggatctgcctacaggggctagactgctgttcagagttagggcccacaacatggctggaccaggggctcctgtgaccacaacagaacctgtgactgtgcaagaaatcctgcagaggcccagactgcagctgcctagacatctgagacagaccatccagaagaaagttggggagcctgtgaacctgctgatcccattccaaggcaagcccagacctcaagtgacctggaccaaagagggacagcccctggctggggaagaagtctccatcagaaacagccccactgacaccatcctgttcatcagagctgccagaagagtgcattctggcacctaccaagtgactgttaggattgagaacatggaagataaggctaccctggtgctgcaggttgtggataagcctagtcctcctcaggacctcagagtcactgatgcctggggactgaatgtggccctggaatggaagcctccacaggatgtgggcaacactgagctgtggggctatacagtgcagaaggcagataagaaaaccatggaatggttcacagtgctggaacactatagaaggacccactgtgtggtgccagagctgatcattggcaatggctactacttcagggtgttcagccagaatatggttggattctctgatagggcagccactaccaaagaaccagtgttcatccccagacctggcatcacctatgagccacctaactacaaggccctggatttctctgaggcccctagcttcacccagcctctggtcaatagaagtgtgattgcagggtacactgccatgctgtgctgtgcagtcagaggcagccccaagcctaagatctcctggttcaaaaatggactggaccttggggaagatgccagattcagaatgttcagcaagcaaggggtgctgaccctggaaatcagaaagccctgtccttttgatggtggcatctatgtgtgtagagccaccaacctccagggagaagctagatgtgaatgcaggctggaagttagagtgcctcagtga

SEQ ID NO: 46 - DNA, 3895 bp, synthetic construct
  source 1..3895: mol_type = other DNA
atgcctgagccggggaagaagccagtctcagcttttagcaagaagccacggtcagtggaagtggccgcaggcagccctgccgtgttcgaggccgagacagagcgggcaggagtgaaggtgcgctggcagcgcggaggcagtgacatcagcgccagcaacaagtacggcctggccacagagggcacacggcatacgctgacagtgcgggaagtgggccctgccgaccagggatcttacgcagtcattgctggctcctccaaggtcaagttcgacctcaaggtcatagaggcagagaaggcagagcccatgctggcccctgcccctgcccctgctgaggccactggagcccctggagaagccccggccccagccgctgagctgggagaaagtgccccaagtcccaaagggtcaagctcagcagctctcaatggtcctacccctggagcccccgatgaccccattggcctcttcgtgatgcggccacaggatggcgaggtgaccgtggaggccatgggcaccggagacctggacctcctatcagccttccgccgcacgagcctggctggaggtggtcggcggatcagtgatagccatgaggacactgggattctggacttcagctcactgctgaaaaagagagacagtttccggaccccgagggactcgaagctggaggcaccagcagaggaggacgtgtgggagatcctacggcaggcacccccatctgagtacgagcgcatcgccttccagtacggcgtcactgacctgcgcggcatgctaaagaggctcaagggcatgaggcgcgatgagaagaagagcacagcctttcagaagaagctggagccggcctaccaggtgagcaaaggccacaagatccggctgaccgtggaactggctgaccatgacgctgaggtcaaatggctcaagaatggccaggagatccagatgagcggcagcaagtacatctttgagtccatcggtgccaagcgtaccctgaccatcagccagtgctcattggcggacgacgcagcctaccagtgcgtggtgggtggcgagaagtgtagcacggagctctttgtgaaagagccccctgtgctcatcacgcgccccttggaggaccagctggtgatggtggggcagcgggtggagtttgagtgtgaagtatcggaggagggggcgcaagtcaaatggctgaaggacggggtggagctgacccgggaggagaccttcaaataccggttcaagaaggacgggcagagacaccacctgatcatcaacgaggccatgctggaggacgcggggcactatgcactgtgcactagcgggggccaggcgctggctgagctcattgtgcaggaaaagaagctggaggtgtaccagagcatcgcagacctgatggtgggcgcaaaggaccaggcggtgttcaaatgtgaggtctcagatgagaatgttcggggtgtgtggctgaagaatgggaaggagctggtgcccgacagccgcataaaggtgtcccacatcgggcgggtccacaaactgaccattgacgacgtcacacctgccgacgaggctgactacagctttgtgcccgagggcttcgcctgcaacctgtcagccaagctccacttcatggaggtcaagattgacttcgtacccaggcaggaacctcccaagatccacctggactgcccaggccgcataccagacaccattgtggttgtagctggaaataagctacgtctggacgtccctatctctggggaccctgctcccactgtgatctggcagaaggctatcacgcaggggaataaggccccagccaggccagccccagatgccccagaggacacaggtgacagcgatgagtgggtgtttgacaagaagctgctgtgtgagaccgagggccgggtccgcgtggagaccaccaaggaccgcagcatcttcacggtcgagggggcagagaaggaagatgagggcgtctacacggtcacagtgaagaaccctgtgggcgaggaccaggtcaacctcacagtcaaggtcatcgacgtgccagacgcacctgcggcccccaagatcagcaacgtgggagaggactcctgcacagtacagtgggagccgcctgcctacgatggcgggcagcccatcctgggctacatcctggagcgcaagaagaagaagagctaccggtggatgcggctgaacttcgacctgattcaggagctgagtcatgaagcgcggcgcatgatcgagggcgtggtgtacgagatgcgcgtctacgcggtcaacgccatcggcatgtccaggcccagccctgcctcccagcccttcatgcctatcggtccccccagcgaacccacccacctggcagtagaggacgtctctgacaccacggtctccctcaagtggcggcccccagagcgcgtgggagcaggaggcctggatggctacagcgtggagtactgcccagagggctgctcagagtgggtggctgccctgcaggggctgacagagcacacatcgatactggtgaaggacctgcccacgggggcccggctgcttttccgagtgcgggcacacaatatggcagggcctggagcccctgttaccaccacggagccggtgacagtgcaggagatcctgcaacggccacggcttcagctgcccaggcacctgcgccagaccattcagaagaaggtcggggagcctgtgaaccttctcatccctttccagggcaagccccggcctcaggtgacctggaccaaagaggggcagcccctggcaggcgaggaggtgagcatccgcaacagccccacagacaccatcctgttcatccgggccgctcgccgcgtgcattcaggcacttaccaggtgacggtgcgcattgagaacatggaggacaaggccacgctggtgctgcaggttgttgacaagccaagtcctccccaggatctccgggtgactgacgcctggggtcttaatgtggctctggagtggaagccaccccaggatgtcggcaacacggagctctgggggtacacagtgcagaaagccgacaagaagaccatggagtggttcaccgtcttggagcattaccgccgcacccactgcgtggtgccagagctcatcattggcaatggctactacttccgcgtcttcagccagaatatggttggctttagtgacagagcggccaccaccaaggagcccgtctttatccccagaccaggcatcacctatgagccacccaactataaggccctggacttctccgaggccccaagcttcacccagcccctggtgaaccgctcggtcatcgcgggctacactgctatgctctgctgtgctgtccggggtagccccaagcccaagatttcctggttcaagaatggcctggacctgggagaagacgcccgcttccgcatgttcagcaagcagggagtgttgactctggagattagaaagccctgcccctttgacgggggcatctatgtctgcagggccaccaacttacagggcgaggcacggtgtgagtgccgcctggaggtgcgagtgcctcagtgaccaggctggctcctggggatggccaggtacaaccggatgccagccccgtgccaggagcctggagggaagttggggaaacccctccctactgttggatgtatgtgtgacaagtgtgtctcctgtgctgcgatgggggatcagcagggcagttgtcgggcagtcctgagtgggtgttgcacagactggtccacagggctcctgaaggaagcccctggatctttggggtaaaaggagggtggcctcaagaaacaatgtctggggacaggcctttctggcctgctatgtcttcccaatgtttattgggcaataaaagataagtgcagtcacagagaactca

SEQ ID NO: 47 - DNA, 400 bp, synthetic construct
  source 1..400: mol_type = other DNA
gttgccttctgccccccaaccctgctcccagctggccctcccaggcctgggttgctggcctctgctttatcaggattctcaagagggacagctggtttatgttgcatgactgttccctgcatatctgctctggttttaaatagcttatctgagcagctggaggaccacatgggcttatatggcgtggggtacatgttcctgtagccttgtccctggcacctgccaaaatagcagccaacaccccccacccccaccgccatccccctgccccacccgtcccctgtcgcacattcctccctccgcagggctggctcaccaggccccagcccacatgcctgcttaaagccctctccatcctctgcctcacccagtccccgctgagactgagcagacgcctcca

SEQ ID NO: 48 - DNA, 600 bp, synthetic construct
  source 1..600: mol_type = other DNA
gtcatggagaagacccaccttgcagatgtcctcactggggctggcagagccggcaacctgcctaaggctgctcagtccattaggagccagtagcctggaagatgtctttacccccagcatcagttcaagtggagcagcacataactcttgccctctgccttccaagattctggtgctgagacttatggagtgtcttggaggttgccttctgccccccaaccctgctcccagctggccctcccaggcctgggttgctggcctctgctttatcaggattctcaagagggacagctggtttatgttgcatgactgttccctgcatatctgctctggttttaaatagcttatctgagcagctggaggaccacatgggcttatatggcgtggggtacatgttcctgtagccttgtccctggcacctgccaaaatagcagccaacaccccccacccccaccgccatccccctgccccacccgtcccctgtcgcacattcctccctccgcagggctggctcaccaggccccagcccacatgcctgcttaaagccctctccatcctctgcctcacccagtccccgctgagactgagcagacgcctcca

SEQ ID NO: 49 - DNA, 469 bp, synthetic construct
  source 1..469: mol_type = other DNA
ccttccaagattctggtgctgagacttatggagtgtcttggaggttgccttctgccccccaaccctgctcccagctggccctcccaggcctgggttgctggcctctgctttatcaggattctcaagagggacagctggtttatgttgcatgactgttccctgcatatctgctctggttttaaatagcttatctgagcagctggaggaccacatgggcttatatggcgtggggtacatgttcctgtagccttgtccctggcacctgccaaaatagcagccaacaccccccacccccaccgccatccccctgccccacccgtcccctgtcgcacattcctccctccgcagggctggctcaccaggccccagcccacatgcctgcttaaagccctctccatcctctgcctcacccagtccccgctgagactgagcagacgcctccaggatctgtcggcagctgctgttctga

SEQ ID NO: 50 - DNA, 499 bp, synthetic construct
  source 1..499: mol_type = other DNA
agtggagcagcacataactcttgccctctgccttccaagattctggtgctgagacttatggagtgtcttggaggttgccttctgccccccaaccctgctcccagctggccctcccaggcctgggttgctggcctctgctttatcaggattctcaagagggacagctggtttatgttgcatgactgttccctgcatatctgctctggttttaaatagcttatctgagcagctggaggaccacatgggcttatatggcgtggggtacatgttcctgtagccttgtccctggcacctgccaaaatagcagccaacaccccccacccccaccgccatccccctgccccacccgtcccctgtcgcacattcctccctccgcagggctggctcaccaggccccagcccacatgcctgcttaaagccctctccatcctctgcctcacccagtccccgctgagactgagcagacgcctccaggatctgtcggcagctgctgttctga

SEQ ID NO: 51 - DNA, 532 bp, synthetic construct
  source 1..532: mol_type = other DNA
ctggaagatgtctttacccccagcatcagttcaagtggagcagcacataactcttgccctctgccttccaagattctggtgctgagacttatggagtgtcttggaggttgccttctgccccccaaccctgctcccagctggccctcccaggcctgggttgctggcctctgctttatcaggattctcaagagggacagctggtttatgttgcatgactgttccctgcatatctgctctggttttaaatagcttatctgagcagctggaggaccacatgggcttatatggcgtggggtacatgttcctgtagccttgtccctggcacctgccaaaatagcagccaacaccccccacccccaccgccatccccctgccccacccgtcccctgtcgcacattcctccctccgcagggctggctcaccaggccccagcccacatgcctgcttaaagccctctccatcctctgcctcacccagtccccgctgagactgagcagacgcctccaggatctgtcggcagctgctgttctga

SEQ ID NO: 52 - DNA, 544 bp, synthetic construct
  source 1..544: mol_type = other DNA
ctcagtccattaggagccagtagcctggaagatgtctttacccccagcatcagttcaagtggagcagcacataactcttgccctctgccttccaagattctggtgctgagacttatggagtgtcttggaggttgccttctgccccccaaccctgctcccagctggccctcccaggcctgggttgctggcctctgctttatcaggattctcaagagggacagctggtttatgttgcatgactgttccctgcatatctgctctggttttaaatagcttatctgagcagctggaggaccacatgggcttatatggcgtggggtacatgttcctgtagccttgtccctggcacctgccaaaatagcagccaacaccccccacccccaccgccatccccctgccccacccgtcccctgtcgcacattcctccctccgcagggctggctcaccaggccccagcccacatgcctgcttaaagccctctccatcctctgcctcacccagtccccgctgagactgagcagacgcctccaggatctgtcggcag

SEQ ID NO: 53 - DNA, 131 bp, synthetic construct
  source 1..131: mol_type = other DNA
gtaagtactagcagctacaatccagctaccattctgcttttattttatggttgggataaggctggattattctgagtccaagctaggcccttttgctaatcatgttcatacctcttatcttcctcccacag

SEQ ID NO: 54 - DNA, 53 bp, synthetic construct
  source 1..53: mol_type = other DNA
ctcctgggcaacgtgctggtctgtgtgctggcccatcactttggcaaagaatt

SEQ ID NO: 55 - DNA, 184 bp, synthetic construct
  source 1..184: mol_type = other DNA
gtaagtactagcagctacaatccagctaccattctgcttttattttatggttgggataaggctggattattctgagtccaagctaggcccttttgctaatcatgttcatacctcttatcttcctcccacagctcctgggcaacgtgctggtctgtgtgctggcccatcactttggcaaagaatt

SEQ ID NO: 56 - DNA, 190 bp, synthetic construct
  source 1..190: mol_type = other DNA
gtaagtactagcagctacaatccagctaccattctgcttttattttatggttgggataaggctggattattctgagtccaagctaggcccttttgctaatcatgttcatacctcttatcttcctcccacagctcctgggcaacgtgctggtctgtgtgctggcccatcactttggcaaagaattgcgatc

SEQ ID NO: 57 - DNA, 196 bp, synthetic construct
  source 1..196: mol_type = other DNA
gtaagtactagcagctacaatccagctaccattctgcttttattttatggttgggataaggctggattattctgagtccaagctaggcccttttgctaatcatgttcatacctcttatcttcctcccacagctcctgggcaacgtgctggtctgtgtgctggcccatcactttggcaaagaattgcgatcgccacc

SEQ ID NO: 58 - DNA, 133 bp, synthetic construct
  source 1..133: mol_type = other DNA
gtaagtatcaaggttacaagacaggtttaaggagaccaatagaaactgggcttgtcgagacagagaagactcttgcgtttctgataggcacctattggtcttactgacatccactttgcctttctctccacag

SEQ ID NO: 59 - DNA, 169 bp, synthetic construct
  source 1..169: mol_type = other DNA
accctggaaggtgccactcccactgtcctttcctaataaaatgaggaaattgcatcgcattgtctgagtaggtgtcattctattctggggggtggggtggggcaggacagcaagggggaggattgggaagacaatagcaggcatgctggggatgcggtgggctctatgg

SEQ ID NO: 60 - DNA, 202 bp, synthetic construct
  source 1..202: mol_type = other DNA
tctgttgtttgcccctcccccgtgccttccttgaccctggaaggtgccactcccactgtcctttcctaataaaatgaggaaattgcatcgcattgtctgagtaggtgtcattctattctggggggtggggtggggcaggacagcaagggggaggattgggaagacaatagcaggcatgctggggatgcggtgggctctatgg

SEQ ID NO: 61 - DNA, 227 bp, synthetic construct
  source 1..227: mol_type = other DNA
agctgtgccttctagttgccagccatctgttgtttgcccctcccccgtgccttccttgaccctggaaggtgccactcccactgtcctttcctaataaaatgaggaaattgcatcgcattgtctgagtaggtgtcattctattctggggggtggggtggggcaggacagcaagggggaggattgggaagacaatagcaggcatgctggggatgcggtgggctctatgg

SEQ ID NO: 62 - DNA, 623 bp, synthetic construct
  source 1..623: mol_type = other DNA
gggtggcatccctgtgacccctccccagtgcctctcctggccctggaagttgccactccagtgcccaccagccttgtcctaataaaattaagttgcatcattttgtctgactaggtgtccttctataatattatggggtggaggggggtggtatggagcaaggggcaagttgggaagacaacctgtagggcctgcggggtctattgggaaccaagctggagtgcagtggcacaatcttggctcactgcaatctccgcctcctgggttcaagcgattctcctgcctcagcctcccgagttgttgggattccaggcatgcatgaccaggctcagctaatttttgtttttttggtagagacggggtttcaccatattggccaggctggtctccaactcctaatctcaggtgatctacccaccttggcctcccaaattgctgggattacaggcgtgaaccactgctcccttccctgtccttctgattttaaaataactataccagcaggaggacgtccagacacagcataggctacctggccatgcccaaccggtgggacatttgagttgcttgcttggcactgtcctctcatgcgttgggtccactcagtagatgcctgttgaatt

SEQ ID NO: 63 - DNA, 222 bp, synthetic construct
  source 1..222: mol_type = other DNA
cagacatgataagatacattgatgagtttggacaaaccacaactagaatgcagtgaaaaaaatgctttatttgtgaaatttgtgatgctattgctttatttgtaaccattataagctgcaataaacaagttaacaacaacaattgcattcattttatgtttcaggttcagggggagatgtgggaggttttttaaagcaagtaaaacctctacaaatgtggta

SEQ ID NO: 64 - DNA, 57 bp, synthetic construct
  source 1..57: mol_type = other DNA
caataaaggatcgtttattttcattggaagcgtgtgttggttttttgatcaggcgcg

SEQ ID NO: 65 - DNA, 49 bp, synthetic construct
  source 1..49: mol_type = other DNA
aataaaagatctttattttcattagatctgtgtgttggttttttgtgtg

SEQ ID NO: 66 - DNA, 57 bp, synthetic construct
  source 1..57: mol_type = other DNA
aataaaggaaatttattttcattgcaatagtgtgttggaattttttgtgtctctcac

SEQ ID NO: 67 - DNA, 130 bp, synthetic construct
  source 1..130: mol_type = other DNA
ctgcgcgctcgctcgctcactgaggccgcccgggcaaagcccgggcgtcgggcgacctttggtcgcccggcctcagtgagcgagcgagcgcgcagagagggagtggccaactccatcactaggggttcct

SEQ ID NO: 68 - DNA, 145 bp, synthetic construct
  source 1..145: mol_type = other DNA
ttggccactccctctctgcgcgctcgctcgctcactgaggccgcccgggcaaagcccgggcgtcgggcgacctttggtcgcccggcctcagtgagcgagcgagcgcgcagagagggagtggccaactccatcactaggggttcct

SEQ ID NO: 69 - DNA, 130 bp, synthetic construct
  source 1..130: mol_type = other DNA
ctgcgcgctcgctcgctcactgaggccgggcgaccaaaggtcgcccgacgcccgggctttgcccgggcggcctcagtgagcgagcgagcgcgcagagagggagtggccaactccatcactaggggttcct

SEQ ID NO: 70 - DNA, 145 bp, synthetic construct
  source 1..145: mol_type = other DNA
ttggccactccctctctgcgcgctcgctcgctcactgaggccgggcgaccaaaggtcgcccgacgcccgggctttgcccgggcggcctcagtgagcgagcgagcgcgcagagagggagtggccaactccatcactaggggttcct

SEQ ID NO: 71 - DNA, 130 bp, synthetic construct
  source 1..130: mol_type = other DNA
aggaacccctagtgatggagttggccactccctctctgcgcgctcgctcgctcactgaggccgggcgaccaaaggtcgcccgacgcccgggctttgcccgggcggcctcagtgagcgagcgagcgcgcag

SEQ ID NO: 72 - DNA, 145 bp, synthetic construct
  source 1..145: mol_type = other DNA
aggaacccctagtgatggagttggccactccctctctgcgcgctcgctcgctcactgaggccgggcgaccaaaggtcgcccgacgcccgggctttgcccgggcggcctcagtgagcgagcgagcgcgcagagagggagtggccaa

SEQ ID NO: 73 - DNA, 130 bp, synthetic construct
  source 1..130: mol_type = other DNA
aggaacccctagtgatggagttggccactccctctctgcgcgctcgctcgctcactgaggccgcccgggcaaagcccgggcgtcgggcgacctttggtcgcccggcctcagtgagcgagcgagcgcgcag

SEQ ID NO: 74 - DNA, 145 bp, synthetic construct
  source 1..145: mol_type = other DNA
aggaacccctagtgatggagttggccactccctctctgcgcgctcgctcgctcactgaggccgcccgggcaaagcccgggcgtcgggcgacctttggtcgcccggcctcagtgagcgagcgagcgcgcagagagggagtggccaa

SEQ ID NO: 75 - protein, 736 aa, Adeno-Associated Virus 9
MAADGYLPDWLEDNLSEGIREWWALKPGAPQPKANQQHQDNARGLVLPGYKYLGPGNGLDKGEPVNAADAAALEHDKAYDQQLKAGDNPYLKYNHADAEFQERLKEDTSFGGNLGRAVFQAKKRLLEPLGLVEEAAKTAPGKKRPVEQSPQEPDSSAGIGKSGAQPAKKRLNFGQTGDTESVPDPQPIGEPPAAPSGVGSLTMASGGGAPVADNNEGADGVGSSSGNWHCDSQWLGDRVITTSTRTWALPTYNNHLYKQISNSTSGGSSNDNAYFGYSTPWGYFDFNRFHCHFSPRDWQRLINNNWGFRPKRLNFKLFNIQVKEVTDNNGVKTIANNLTSTVQVFTDSDYQLPYVLGSAHEGCLPPFPADVFMIPQYGYLTLNDGSQAVGRSSFYCLEYFPSQMLRTGNNFQFSYEFENVPFHSSYAHSQSLDRLMNPLIDQYLYYLSKTINGSGQNQQTLKFSVAGPSNMAVQGRNYIPGPSYRQQRVSTTVTQNNNSEFAWPGASSWALNGRNSLMNPGPAMASHKEGEDRFFPLSGSLIFGKQGTGRDNVDADKVMITNEEEIKTTNPVATESYGQVATNHQSAQAQAQTGWVQNQGILPGMVWQDRDVYLQGPIWAKIPHTDGNFHPSPLMGGFGMKHPPPQILIKNTPVPADPPTAFNKDKLNSFITQYSTGQVSVEIEWELQKENSKRWNPEIQYTSNYYKSNNVEFAVNTEGVYSEPRPIGTRYLTRNL

SEQ ID NO: 76 - protein, 736 aa, Adeno-associated virus Rh.8
MAADGYLPDWLEDNLSEGIREWWDLKPGAPKPKANQQKQDDGRGLVLPGYKYLGPFNGLDKGEPVNAADAAALEHDKAYDQQLKAGDNPYLRYNHADAEFQERLQEDTSFGGNLGRAVFQAKKRVLEPLGLVEEGAKTAPGKKRPVEQSPQEPDSSSGIGKTGQQPAKKRLNFGQTGDSESVPDPQPLGEPPAAPSGLGPNTMASGGGAPMADNNEGADGVGNSSGNWHCDSTWLGDRVITTSTRTWALPTYNNHLYKQISNGTSGGSTNDNTYFGYSTPWGYFDFNRFHCHFSPRDWQRLINNNWGFRPKRLNFKLFNIQVKEVTTNEGTKTIANNLTSTVQVFTDSEYQLPYVLGSAHQGCLPPFPADVFMVPQYGYLTLNNGSQALGRSSFYCLEYFPSQMLRTGNNFQFSYTFEDVPFHSSYAHSQSLDRLMNPLIDQYLYYLVRTQTTGTGGTQTLAFSQAGPSSMANQARNWVPGPCYRQQRVSTTTNQNNNSNFAWTGAAKFKLNGRDSLMNPGVAMASHKDDDDRFFPSSGVLIFGKQGAGNDGVDYSQVLITDEEEIKATNPVATEEYGAVAINNQAANTQAQTGLVHNQGVIPGMVWQNRDVYLQGPIWAKIPHTDGNFHPSPLMGGFGLKHPPPQILIKNTPVPADPPLTFNQAKLNSFITQYSTGQVSVEIEWELQKENSKRWNPEIQYTSNYYKSTNVDFAVNTEGVYSEPRPIGTRYLTRNL

SEQ ID NO: 77 - protein, 738 aa, Adeno-associated virus Rh.10
MAADGYLPDWLEDNLSEGIREWWDLKPGAPKPKANQQKQDDGRGLVLPGYKYLGPFNGLDKGEPVNAADAAALEHDKAYDQQLKAGDNPYLRYNHADAEFQERLQEDTSFGGNLGRAVFQAKKRVLEPLGLVEEGAKTAPGKKRPVEPSPQRSPDSSTGIGKKGQQPAKKRLNFGQTGDSESVPDPQPIGEPPAGPSGLGSGTMAAGGGAPMADNNEGADGVGSSSGNWHCDSTWLGDRVITTSTRTWALPTYNNHLYKQISNGTSGGSTNDNTYFGYSTPWGYFDFNRFHCHFSPRDWQRLINNNWGFRPKRLNFKLFNIQVKEVTQNEGTKTIANNLTSTIQVFTDSEYQLPYVLGSAHQGCLPPFPADVFMIPQYGYLTLNNGSQAVGRSSFYCLEYFPSQMLRTGNNFEFSYQFEDVPFHSSYAHSQSLDRLMNPLIDQYLYYLSRTQSTGGTAGTQQLLFSQAGPNNMSAQAKNWLPGPCYRQQRVSTTLSQNNNSNFAWTGATKYHLNGRDSLVNPGVAMATHKDDEERFFPSSGVLMFGKQGAGKDNVDYSSVMLTSEEEIKTTNPVATEQYGVVADNLQQQNAAPIVGAVNSQGALPGMVWQNRDVYLQGPIWAKIPHTDGNFHPSPLMGGFGLKHPPPQILIKNTPVPADPPTTFSQAKLASFITQYSTGQVSVEIEWELQKENSKRWNPEIQYTSNYYKSTNVDFAVNTDGTYSEPRPIGTRYLTRNL

SEQ ID NO: 78 - protein, 738 aa, Adeno-associated virus Rh.74
MAADGYLPDWLEDNLSEGIREWWDLKPGAPKPKANQQKQDNGRGLVLPGYKYLGPFNGLDKGEPVNAADAAALEHDKAYDQQLQAGDNPYLRYNHADAEFQERLQEDTSFGGNLGRAVFQAKKRVLEPLGLVESPVKTAPGKKRPVEPSPQRSPDSSTGIGKKGQQPAKKRLNFGQTGDSESVPDPQPIGEPPAGPSGLGSGTMAAGGGAPMADNNEGADGVGSSSGNWHCDSTWLGDRVITTSTRTWALPTYNNHLYKQISNGTSGGSTNDNTYFGYSTPWGYFDFNRFHCHFSPRDWQRLINNNWGFRPKRLNFKLFNIQVKEVTQNEGTKTIANNLTSTIQVFTDSEYQLPYVLGSAHQGCLPPFPADVFMIPQYGYLTLNNGSQAVGRSSFYCLEYFPSQMLRTGNNFEFSYNFEDVPFHSSYAHSQSLDRLMNPLIDQYLYYLSRTQSTGGTAGTQQLLFSQAGPNNMSAQAKNWLPGPCYRQQRVSTTLSQNNNSNFAWTGATKYHLNGRDSLVNPGVAMATHKDDEERFFPSSGVLMFGKQGAGKDNVDYSSVMLTSEEEIKTTNPVATEQYGVVADNLQQQNAAPIVGAVNSQGALPGMVWQNRDVYLQGPIWAKIPHTDGNFHPSPLMGGFGLKHPPPQILIKNTPVPADPPTTFNQAKLASFITQYSTGQVSVEIEWELQKENSKRWNPEIQYTSNYYKSTNVDFAVNTEGTYSEPRPIGTRYLTRNL

SEQ ID NO: 79 - protein, 736 aa, Adeno-associated virus 1
MAADGYLPDWLEDNLSEGIREWWALKPGVPQPKANQQHQDNRRGLVLPGYKYLGPGNGLDKGEPVNEADAAALEHDKAYDQQLKAGDNPYLKYNHADAEFQERLQEDTSFGGNLGRAVFQAKKRILEPLGLVEEAAKTAPGKKRPVDQSPQEPDSSSGVGKSGKQPARKRLNFGQTGDSESVPDPQPLGEPPAAPTSLGSNTMASGGGAPMADNNEGADGVGNSSGNWHCDSQWLGDRVITTSTRTWALPTYNNHLYKQISSQSGASNDNHYFGYSTPWGYFDFNRFHCHFSPRDWQRLINNNWGFRPKKLSFKLFNIQVKEVTQNDGTTTIANNLTSTVQVFTDSEYQLPYVLGSAHQGCLPPFPADVFMVPQYGYLTLNNGSQAVGRSSFYCLEYFPSQMLRTGNNFQFSYTFEDVPFHSSYAHSQSLDRLMNPLIDQYLYYLNRTQGTTSGTTNQSRLLFSQAGPQSMSLQARNWLPGPCYRQQRLSKTANDNNNSNFPWTAASKYHLNGRDSLVNPGPAMASHKDDEEKFFPMHGNLIFGKEGTTASNAELDNVMITDEEEIRTTNPVATEQYGTVANNLQSSNTAPTTRTVNDQGALPGMVWQDRDVYLQGPIWAKIPHTDGHFHPSPLMGGFGLKHPPPQIMIKNTPVPANPPTTFSPAKFASFITQYSTGQVSVEIEWELQKENSKRWNPEIQYTSNYNKSVNVDFTVDTNGVYSEPRPIGTRYLTRNL

SEQ ID NO: 80 - protein, 735 aa, Adeno-associated virus 2 [sequence omitted]

SEQ ID NO: 81 - protein, 736 aa, Adeno-associated virus 3
MAADGYLPDWLEDNLSEGIREWWALKPGVPQPKANQQHQDNRRGLVLPGYKYLGPGNGLDKGEPVNEADAAALEHDKAYDQQLKAGDNPYLKYNHADAEFQERLQEDTSFGGNLGRAVFQAKKRILEPLGLVEEAAKTAPGKKGAVDQSPQEPDSSSGVGKSGKQPARKRLNFGQTGDSESVPDPQPLGEPPAAPTSLGSNTMASGGGAPMADNNEGADGVGNSSGNWHCDSQWLGDRVITTSTRTWALPTYNNHLYKQISSQSGASNDNHYFGYSTPWGYFDFNRFHCHFSPRDWQRLINNNWGFRPKKLSFKLFNIQVRGVTQNDGTTTIANNLTSTVQVFTDSEYQLPYVLGSAHQGCLPPFPADVFMVPQYGYLTLNNGSQAVGRSSFYCLEYFPSQMLRTGNNFQFSYTFEDVPFHSSYAHSQSLDRLMNPLIDQYLYYLNRTQGTTSGTTNQSRLLFSQAGPQSMSLQARNWLPGPCYRQQRLSKTANDNNNSNFPWTAASKYHLNGRDSLVNPGPAMASHKDDEEKFFPMHGNLIFGKEGTTASNAELDNVMITDEEEIRTTNPVATEQYGTVANNLQSSNTAPTTGTVNHQGALPGMVWQDRDVYLQGPIWAKIPHTDGHFHPSPLMGGFGLKHPPPQIMIKNTPVPANPPTTFSPAKFASFITQYSTGQVSVEIEWELQKENSKRWNPEIQYTSNYNKSVNVDFTVDTNGVYSEPRPIGTRYLTRNL

SEQ ID NO: 82 - protein, 736 aa, Adeno-associated virus 3B; identical to SEQ ID NO: 79

SEQ ID NO: 83 - protein, 734 aa, Adeno-associated virus 4
MTDGYLPDWLEDNLSEGVREWWALQPGAPKPKANQQHQDNARGLVLPGYKYLGPGNGLDKGEPVNAADAAALEHDKAYDQQLKAGDNPYLKYNHADAEFQQRLQGDTSFGGNLGRAVFQAKKRVLEPLGLVEQAGETAPGKKRPLIESPQQPDSSTGIGKKGKQPAKKKLVFEDETGAGDGPPEGSTSGAMSDDSEMRAAAGGAAVEGGQGADGVGNASGDWHCDSTWSEGHVTTTSTRTWVLPTYNNHLYKRLGESLQSNTYNGFSTPWGYFDFNRFHCHFSPRDWQRLINNNWGMRPKAMRVKIFNIQVKEVTTSNGETTVANNLTSTVQIFADSSYELPYVMDAGQEGSLPPFPNDVFMVPQYGYCGLVTGNTSQQQTDRNAFYCLEYFPSQMLRTGNNFEITYSFEKVPFHSMYAHSQSLDRLMNPLIDQYLWGLQSTTTGTTLNAGTATTNFTKLRPTNFSNFKKNWLPGPSIKQQGFSKTANQNYKIPATGSDSLIKYETHSTLDGRWSALTPGPPMATAGPADSKFSNSQLIFAGPKQNGNTATVPGTLIFTSEEELAATNATDTDMWGNLPGGDQSNSNLPTVDRLTALGAVPGMVWQNRDIYYQGPIWAKIPHTDGHFHPSPLIGGFGLKHPPPQIFIKNTPVPANPATTFSSTPVNSFITQYSTGQVSVQIDWEIQKERSKRWNPEVQFTSNYGQQNSLLWAPDAAGKYTEPRAIGTRYLTHHL

SEQ ID NO: 84 - protein, 724 aa, Adeno-associated virus 5
MSFVDHPPDWLEEVGEGLREFLGLEAGPPKPKPNQQHQDQARGLVLPGYNYLGPGNGLDRGEPVNRADEVAREHDISYNEQLEAGDNPYLKYNHADAEFQEKLADDTSFGGNLGKAVFQAKKRVLEPFGLVEEGAKTAPTGKRIDDHFPKRKKARTEEDSKPSTSSDAEAGPSGSQQLQIPAQPASSLGADTMSAGGGGPLGDNNQGADGVGNASGDWHCDSTWMGDRVVTKSTRTWVLPSYNNHQYREIKSGSVDGSNANAYFGYSTPWGYFDFNRFHSHWSPRDWQRLINNYWGFRPRSLRVKIFNIQVKEVTVQDSTTTIANNLTSTVQVFTDDDYQLPYVVGNGTEGCLPAFPPQVFTLPQYGYATLNRDNTENPTERSSFFCLEYFPSKMLRTGNNFEFTYNFEEVPFHSSFAPSQNLFKLANPLVDQYLYRFVSTNNTGGVQFNKNLAGRYANTYKNWFPGPMGRTQGWNLGSGVNRASVSAFATTNRMELEGASYQVPPQPNGMTNNLQGSNTYALENTMIFNSQPANPGTTATYLEGNMLITSESETQPVNRVAYNVGGQMATNNQSSTTAPATGTYNLQEIVPGSVWMERDVYLQGPIWAKIPETGAHFHPSPAMGGFGLKHPPPMMLIKNTPVPGNITSFSDVPVSSFITQYSTGQVTVEMEWELKKENSKRWNPEIQYTNNYNDPQFVDFAPDSTGEYRTTRPIGTRYLTRPL

SEQ ID NO: 85 - protein, 736 aa, Adeno-associated virus 6
MAADGYLPDWLEDNLSEGIREWWDLKPGAPKPKANQQKQDDGRGLVLPGYKYLGPFNGLDKGEPVNAADAAALEHDKAYDQQLKAGDNPYLRYNHADAEFQERLQEDTSFGGNLGRAVFQAKKRVLEPFGLVEEGAKTAPGKKRPVEQSPQEPDSSSGIGKTGQQPAKKRLNFGQTGDSESVPDPQPLGEPPATPAAVGPTTMASGGGAPMADNNEGADGVGNASGNWHCDSTWLGDRVITTSTRTWALPTYNNHLYKQISSASTGASNDNHYFGYSTPWGYFDFNRFHCHFSPRDWQRLINNNWGFRPKRLNFKLFNIQVKEVTTNDGVTTIANNLTSTVQVFSDSEYQLPYVLGSAHQGCLPPFPADVFMIPQYGYLTLNNGSQAVGRSSFYCLEYFPSQMLRTGNNFTFSYTFEDVPFHSSYAHSQSLDRLMNPLIDQYLYYLNRTQNQSGSAQNKDLLFSRGSPAGMSVQPKNWLPGPCYRQQRVSKTKTDNNNSNFTWTGASKYNLNGRESIINPGTAMASHKDDKDKFFPMSGVMIFGKESAGASNTALDNVMITDEEEIKATNPVATERFGTVAVNLQSSSTDPATGDVHVMGALPGMVWQDRDVYLQGPIWAKIPHTDGHFHPSPLMGGFGLKHPPPQILIKNTPVPANPPAEFSATKFASFITQYSTGQVSVEIEWELQKENSKRWNPEVQYTSNYAKSANVDFTVDNNGLYTEPRPIGTRYLTRPL

SEQ ID NO: 86 - protein, 737 aa, Adeno-associated virus 7
MAADGYLPDWLEDNLSEGIREWWDLKPGAPKPKANQQKQDNGRGLVLPGYKYLGPFNGLDKGEPVNAADAAALEHDKAYDQQLKAGDNPYLRYNHADAEFQERLQEDTSFGGNLGRAVFQAKKRVLEPLGLVEEGAKTAPAKKRPVEPSPQRSPDSSTGIGKKGQQPARKRLNFGQTGDSESVPDPQPLGEPPAAPSSVGSGTVAAGGGAPMADNNEGADGVGNASGNWHCDSTWLGDRVITTSTRTWALPTYNNHLYKQISSETAGSTNDNTYFGYSTPWGYFDFNRFHCHFSPRDWQRLINNNWGFRPKKLRFKLFNIQVKEVTTNDGVTTIANNLTSTIQVFSDSEYQLPYVLGSAHQGCLPPFPADVFMIPQYGYLTLNNGSQSVGRSSFYCLEYFPSQMLRTGNNFEFSYSFEDVPFHSSYAHSQSLDRLMNPLIDQYLYYLARTQSNPGGTAGNRELQFYQGGPSTMAEQAKNWLPGPCFRQQRVSKTLDQNNNSNFAWTGATKYHLNGRNSLVNPGVAMATHKDDEDRFFPSSGVLIFGKTGATNKTTLENVLMTNEEEIRPTNPVATEEYGIVSSNLQAANTAAQTQVVNNQGALPGMVWQNRDVYLQGPIWAKIPHTDGNFHPSPLMGGFGLKHPPPQILIKNTPVPANPPEVFTPAKFASFITQYSTGQVSVEIEWELQKENSKRWNPEIQYTSNFEKQTGVDFAVDSQGVYSEPRPIGTRYLTRNL

SEQ ID NO: 87 - protein, 738 aa, Adeno-associated virus 8
MAADGYLPDWLEDNLSEGIREWWALKPGAPKPKANQQKQDDGRGLVLPGYKYLGPFNGLDKGEPVNAADAAALEHDKAYDQQLQAGDNPYLRYNHADAEFQERLQEDTSFGGNLGRAVFQAKKRVLEPLGLVEEGAKTAPGKKRPVEPSPQRSPDSSTGIGKKGQQPARKRLNFGQTGDSESVPDPQPLGEPPAAPSGVGPNTMAAGGGAPMADNNEGADGVGSSSGNWHCDSTWLGDRVITTSTRTWALPTYNNHLYKQISNGTSGGATNDNTYFGYSTPWGYFDFNRFHCHFSPRDWQRLINNNWGFRPKRLSFKLFNIQVKEVTQNEGTKTIANNLTSTIQVFTDSEYQLPYVLGSAHQGCLPPFPADVFMIPQYGYLTLNNGSQAVGRSSFYCLEYFPSQMLRTGNNFQFTYTFEDVPFHSSYAHSQSLDRLMNPLIDQYLYYLSRTQTTGGTANTQTLGFSQGGPNTMANQAKNWLPGPCYRQQRVSTTTGQNNNSNFAWTAGTKYHLNGRNSLANPGIAMATHKDDEERFFPSNGILIFGKQNAARDNADYSDVMLTSEEEIKTTNPVATEEYGIVADNLQQQNTAPQIGTVNSQGALPGMVWQNRDVYLQGPIWAKIPHTDGNFHPSPLMGGFGLKHPPPQILIKNTPVPADPPTTFNQSKLNSFITQYSTGQVSVEIEWELQKENSKRWNPEIQYTSNYYKSTSVDFAVNTEGVYSEPRPIGTRYLTRNL

SEQ ID NO: 88 - protein, 738 aa, Adeno-associated virus 10
MAADGYLPDWLEDNLSEGIREWWDLKPGAPKPKANQQKQDDGRGLVLPGYKYLGPFNGLDKGEPVNAADAAALEHDKAYDQQLKAGDNPYLRYNHADAEFQERLQEDTSFGGNLGRAVFQAKKRVLEPLGLVEEAAKTAPGKKRPVEPSPQRSPDSSTGIGKKGQQPAKKRLNFGQTGESESVPDPQPIGEPPAGPSGLGSGTMAAGGGAPMADNNEGADGVGSSSGNWHCDSTWLGDRVITTSTRTWALPTYNNHLYKQISNGTSGGSTNDNTYFGYSTPWGYFDFNRFHCHFSPRDWQRLINNNWGFRPKRLSFKLFNIQVKEVTQNEGTKTIANNLTSTIQVFTDSEYQLPYVLGSAHQGCLPPFPADVFMIPQYGYLTLNNGSQAVGRSSFYCLEYFPSQMLRTGNNFEFSYTFEDVPFHSSYAHSQSLDRLMNPLIDQYLYYLSRTQSTGGTQGTQQLLFSQAGPANMSAQAKNWLPGPCYRQQRVSTTLSQNNNSNFAWTGATKYHLNGRDSLVNPGVAMATHKDDEERFFPSSGVLMFGKQGAGRDNVDYSSVMLTSEEEIKTTNPVATEQYGVVADNLQQANTGPIVGNVNSQGALPGMVWQNRDVYLQGPIWAKIPHTDGNFHPSPLMGGFGLKHPPPQILIKNTPVPADPPTTFSQAKLASFITQYSTGQVSVEIEWELQKENSKRWNPEIQYTSNYYKSTNVDFAVNTEGTYSEPRPIGTRYLTRNL

SEQ ID NO: 89 - protein, 733 aa, Adeno-associated virus 11
MAADGYLPDWLEDNLSEGIREWWDLKPGAPKPKANQQKQDDGRGLVLPGYKYLGPFNGLDKGEPVNAADAAALEHDKAYDQQLKAGDNPYLRYNHADAEFQERLQEDTSFGGNLGRAVFQAKKRVLEPLGLVEEGAKTAPGKKRPLESPQEPDSSSGIGKKGKQPARKRLNFEEDTGAGDGPPEGSDTSAMSSDIEMRAAPGGNAVDAGQGSDGVGNASGDWHCDSTWSEGKVTTTSTRTWVLPTYNNHLYLRLGTTSSSNTYNGFSTPWGYFDFNRFHCHFSPRDWQRLINNNWGLRPKAMRVKIFNIQVKEVTTSNGETTVANNLTSTVQIFADSSYELPYVMDAGQEGSLPPFPNDVFMVPQYGYCGIVTGENQNQTDRNAFYCLEYFPSQMLRTGNNFEMAYNFEKVPFHSMYAHSQSLDRLMNPLLDQYLWHLQSTTSGETLNQGNAATTFGKIRSGDFAFYRKNWLPGPCVKQQRFSKTASQNYKIPASGGNALLKYDTHYTLNNRWSNIAPGPPMATAGPSDGDFSNAQLIFPGPSVTGNTTTSANNLLFTSEEEIAATNPRDTDMFGQIADNNQNATTAPITGNVTAMGVLPGMVWQNRDIYYQGPIWAKIPHADGHFHPSPLIGGFGLKHPPPQIFIKNTPVPANPATTFTAARVDSFITQYSTGQVAVQIEWEIEKERSKRWNPEVQFTSNYGNQSSMLWAPDTTGKYTEPRVIGSRYLTNHL

SEQ ID NO: 90 - protein, 742 aa, Adeno-associated virus 12
MAADGYLPDWLEDNLSEGIREWWALKPGAPQPKANQQHQDNGRGLVLPGYKYLGPFNGLDKGEPVNEADAAALEHDKAYDKQLEQGDNPYLKYNHADAEFQQRLATDTSFGGNLGRAVFQAKKRILEPLGLVEEGVKTAPGKKRPLEKTPNRPTNPDSGKAPAKKKQKDGEPADSARRTLDFEDSGAGDGPPEGSSSGEMSHDAEMRAAPGGNAVEAGQGADGVGNASGDWHCDSTWSEGRVTTTSTRTWVLPTYNNHLYLRIGTTANSNTYNGFSTPWGYFDFNRFHCHFSPRDWQRLINNNWGLRPKSMRVKIFNIQVKEVTTSNGETTVANNLTSTVQIFADSTYELPYVMDAGQEGSFPPFPNDVFMVPQYGYCGVVTGKNQNQTDRNAFYCLEYFPSQMLRTGNNFEVSYQFEKVPFHSMYAHSQSLDRMMNPLLDQYLWHLQSTTTGNSLNQGTATTTYGKITTGDFAYYRKNWLPGACIKQQKFSKNANQNYKIPASGGDALLKYDTHTTLNGRWSNMAPGPPMATAGAGDSDFSNSQLIFAGPNPSGNTTTSSNNLLFTSEEEIATTNPRDTDMFGQIADNNQNATTAPHIANLDAMGIVPGMVWQNRDIYYQGPIWAKVPHTDGHFHPSPLMGGFGLKHPPPQIFIKNTPVPANPNTTFSAARINSFLTQYSTGQVAVQIDWEIQKEHSKRWNPEVQFTSNYGTQNSMLWAPDNAGNYHELRAIGSRFLTHHL

SEQ ID NO: 91 - protein, 733 aa, Adeno-associated virus 13
MTDGYLPDWLEDNLSEGVREWWALQPGAPKPKANQQHQDNARGLVLPGYKYLGPGNGLDKGEPVNAADAAALEHDKAYDQQLKAGDNPYLKYNHADAEFQERLQEDTSFGGNLGRAVFQAKKRILEPLGLVEEAAKTAPGKKRPVEQSPAEPDSSSGIGKSGQQPARKRLNFGQTGDTESVPDPQPLGQPPAAPSGVGSTTMASGGGAPMADNNEGADGVGNSSGNWHCDSQWLGDRVITTSTRTWALPTYNNHLYKQISSQSGATNDNHYFGYSTPWGYFDFNRFHCHFSPRDWQRLINNNWGFRPKRLNFKLFNIQVKEVTQNDGTTTIANNLTSTVQVFTDSEYQLPYVLGSAHQGCLPPFPADVFMVPQYGYLTLNNGSQAVGRSSFYCLEYFPSQMLRTGNNFQFSYTFEDVPFHSSYAHSQSLDRLMNPLIDQYLYYLNRTQTASGTQQSRLLFSQAGPTSMSLQAKNWLPGPCYRQQRLSKQANDNNNSNFPWTGATKYHLNGRDSLVNPGPAMASHKDDKEKFFPMHGTLIFGKEGTNANNADLENVMITDEEEIRTTNPVATEQYGTVSNNLQNSNAGPTTGTVNHQGALPGMVWQDRDVYLQGPIWAKIPHTDGHFHPSPLMGGFGLKHPPPQIMIKNTPVPANPPTNFSAAKFASFITQYSTGQVSVEIEWELQKENSKRWNPEIQYTSNYNKSVNVDFTVDTNGVYSEPRPIGTRYLTRNL

SEQ ID NO: 92 - DNA, 4950 bp, synthetic construct
  source 1..4950: mol_type = other DNA
ctgcgcgctcgctcgctcactgaggccgggcgaccaaaggtcgcccgacgcccgggctttgcccgggcggcctcagtgagcgagcgagcgcgcagagagggagtggccaactccatcactaggggttcctgcggccgcacgcgtctcagtccattaggagccagtagcctggaagatgtctttacccccagcatcagttcaagtggagcagcacataactcttgccctctgccttccaagattctggtgctgagacttatggagtgtcttggaggttgccttctgccccccaaccctgctcccagctggccctcccaggcctgggttgctggcctctgctttatcaggattctcaagagggacagctggtttatgttgcatgactgttccctgcatatctgctctggttttaaatagcttatctgagcagctggaggaccacatgggcttatatggcgtggggtacatgttcctgtagccttgtccctggcacctgccaaaatagcagccaacaccccccacccccaccgccatccccctgccccacccgtcccctgtcgcacattcctccctccgcagggctggctcaccaggccccagcccacatgcctgcttaaagccctctccatcctctgcctcacccagtccccgctgagactgagcagacgcctccaggatctgtcggcagggtttagtgaaccgtcagatcctgcagaagttggtcgtgaggcactagtgggcaggtaagtatcaaggttacaagacaggtttaaggagaccaatagaaactgggcttgtcgagacagagaagactcttgcgtttctgataggcacctattggtcttactgacatccactttgcctttctctccacaggtgtactagtccgccaccatgcctgagcctggaaagaaacctgtgtccgccttcagcaagaagcccagatccgttgaagtggccgctggaagccctgccgtgtttgaggccgaaacagaacgcgctggcgtgaaagttcgatggcagagaggcggcagcgatatcagcgccagcaacaaatatggcctggccaccgagggcaccagacacacactgacagtcagagaagtgggccctgccgatcagggctcttatgccgtgattgccggcagcagcaaagtgaagttcgacctgaaagtgatcgaggccgagaaggccgagcctatgcttgctcctgctccagctcctgctgaagctacaggtgctcctggcgaagctccagcaccagctgctgaactgggagagtctgccccatctcctaagggctctagcagcgccgctctgaatggacctacacctggcgctcccgatgatcccatcggcctgtttgttatgaggccccaggatggcgaagtgacagtcggcggcagcatcacctttagcgctagagttgcaggcgccagcctgctgaaacctcctgtggtcaagtggttcaaaggcaaatgggtcgacctgtcctccaaagtgggccagcatctgcagctccacgacagctacgatagagccagcaaggtgtacctgttcgagctgcacatcacagacgcccagccagcctttaccggcagctacagatgtgaagtgtccaccaaggacaagttcgactgcagcaacttcaacctgaccgtgcacgaggccatgggcacaggcgatctggatctgctgagcgcctttcggagaacatctctggctggcggcggaagaagaatcagcgacagccacgaggataccggcatcctggatttcagcagcctgctcaagaagcgggacagcttcagaacccctcgggacagcaaactggaagctcccgccgaggaagatgtctgggagatcctgagacaggcccctcctagcgagtacgagagaatcgcctttcagtacggcgtgaccgacctgagaggcatgctgaagaggctgaagggcatgcgccgggacgagaagaagtccacagccttccagaagaagctggaacccgcctaccaggtgtccaagggccacaagatcagactgaccgtggaactggccgaccacgacgccgaagtgaagtggctgaaaaacggccaagagattcagatgagcggcagcaagtacatcttcgagagcatcggcgccaagcggaccctgacaatcagccagtgtagcctggccgatgacgccgcctatcagtgtgttgttggcggcgagaagtgcagcaccgagctgttcgtgaaagaacctccagtgctgatcacccggcctctggaagatcagctggtcatggtcggacagcgcgtggaattcgagtgcgaggtttccgaagagggcgcccaagtcaaatggctgaaggatggcgtcgagctgaccagagaggaaaccttcaagtaccggttcaagaaggacggccagcggcaccacctgatcatcaatgaagccatgctggaagatgccggccactacgccttgtgtacatctggtggacaggccctggccgagctgattgtgcaagagaagaaactcgaggtgtaccagtctatcgccgacctgatggtcggagccaaagaccaggccgtgttcaagtgcgaagtgtccgacgagaatgtgcgcggcgtgtggctcaagaacggcaaagaactggtgcccgacagccggatcaaggtgtcccacattggcagagtgcacaagctgaccatcgacgacgtgacccctgctgacgaggccgattacagctttgtgcctgagggcttcgcctgtaacctgagcgccaagctgcactttatggaagtcaagatcgacttcgtgccccggcaagagcctcctaagatccacctggattgccctggcagaatccccgacacaatcgtggtggtggccggaaacaagctgagactggatgtgcccatcagcggcgatcctgctcctacagtgatctggcagaaggccatcacacagggcaacaaggcccctgctagacccgctcctgatgctcctgaagataccggcgatagcgacgagtgggtgttcgacaagaaactgctgtgcgagacagagggaagagtgcgagtggaaaccacaaaggaccgcagcatcttcaccgtggaaggcgccgagaaagaggacgagggcgtctacacagtgaccgtgaagaatcccgtgggcgaagatcaagtgaacctgacagtgaaagtcatcgacgtgcccgacgctcctgccgctccaaagatctctaacgtgggagaagatagctgcaccgtgcagtgggagcctccagcttatgatggcggacagcctatcctgggctacatcctggaacgcaagaagaaaaagtcctaccggtggatgcggctgaacttcgatctgatccaagagctgagccacgaagccagacggatgatcgaaggcgtggtgtacgagatgagagtgtacgccgtgaacgccatcggcatgagcagaccttctccagcctctcagcccttcatgcctatcggccctccaagcgaacctacacacctggccgttgaggacgtgtccgataccaccgtgtctctgaaatggcggcctcctgagagagttggagctggcggactggatggctacagcgtggaatactgtccagagggctgtagcgagtgggttgcagctctgcagggactgaccgagcacacctctatcctggtcaaggacctgcctaccggcgctagactgctgtttagagtgcgggcccacaacatggctggaccaggtgcaccagtgaccaccacagaacccgtgacagtgcaagaaatcctgcagcggccaagactgcagctgcccagacacctgaggcagaccatccagaaaaaagtgggcgagcccgtgaacctgctgatcccatttcaaggcaagcccagacctcaagtgacctggaccaaagagggacagcctctggccggcgaagaggtgtccatcagaaacagccccaccgacaccatcctgttcatcagagccgccagaagggtgcactccggcacctatcaagtgactgtgcggatcgagaacatggaagataaggccacactggtgctgcaggtcgtggacaaacccagtcctcctcaggacctgcgcgtgacagatgcctggggactgaatgtggctctggaatggaagcctccacaggacgtgggcaacacagagctgtggggctataccgtgcagaaagccgacaaaaagaccatggaatggttcaccgtgctggaacactaccggcggacccattgtgtggtgcctgagctgatcatcggcaacggctactacttccgggtgttcagccagaatatggtcggattcagcgatagggccgccaccacaaaagaaccagtgttcatccccagacctggcatcacctacgagcctccaaactacaaggccctggacttcagcgaggcccctagctttacacagcccctggtcaacagaagcgtgatcgccggctacaccgccatgctgtgttgtgccgttagaggcagccccaagcctaagatctcctggtttaagaacggcctggacctcggcgaggacgccagattcagaatgttcagcaagcagggcgtgctgaccctggaaatcagaaagccctgtcctttcgacggcggcatctacgtgtgcagagccaccaatctgcagggcgaagctagatgcgagtgcagactggaagttcgggtgccccagtaagcggccgccaataaaggatcgtttattttcattggaagcgtgtgttggttttttgatcaggcgcgtccaagcttgcatgctggggagagatctgcggccgcaggaacccctagtgatggagttggccactccctctctgcgcgctcgctcgctcactgaggccgcccgggcaaagcccgggcgtcgggcgacctttggtcgcccggcctcagtgagcgagcgagcgcgcag

SEQ ID NO: 93 - DNA, 4980 bp, synthetic construct
  source 1..4980: mol_type = other DNA
ttggccactccctctctgcgcgctcgctcgctcactgaggccgggcgaccaaaggtcgcccgacgcccgggctttgcccgggcggcctcagtgagcgagcgagcgcgcagagagggagtggccaactccatcactaggggttcctgcggccgcacgcgtctcagtccattaggagccagtagcctggaagatgtctttacccccagcatcagttcaagtggagcagcacataactcttgccctctgccttccaagattctggtgctgagacttatggagtgtcttggaggttgccttctgccccccaaccctgctcccagctggccctcccaggcctgggttgctggcctctgctttatcaggattctcaagagggacagctggtttatgttgcatgactgttccctgcatatctgctctggttttaaatagcttatctgagcagctggaggaccacatgggcttatatggcgtggggtacatgttcctgtagccttgtccctggcacctgccaaaatagcagccaacaccccccacccccaccgccatccccctgccccacccgtcccctgtcgcacattcctccctccgcagggctggctcaccaggccccagcccacatgcctgcttaaagccctctccatcctctgcctcacccagtccccgctgagactgagcagacgcctccaggatctgtcggcagggtttagtgaaccgtcagatcctgcagaagttggtcgtgaggcactagtgggcaggtaagtatcaaggttacaagacaggtttaaggagaccaatagaaactgggcttgtcgagacagagaagactcttgcgtttctgataggcacctattggtcttactgacatccactttgcctttctctccacaggtgtactagtccgccaccatgcctgagcctggaaagaaacctgtgtccgccttcagcaagaagcccagatccgttgaagtggccgctggaagccctgccgtgtttgaggccgaaacagaacgcgctggcgtgaaagttcgatggcagagaggcggcagcgatatcagcgccagcaacaaatatggcctggccaccgagggcaccagacacacactgacagtcagagaagtgggccctgccgatcagggctcttatgccgtgattgccggcagcagcaaagtgaagttcgacctgaaagtgatcgaggccgagaaggccgagcctatgcttgctcctgctccagctcctgctgaagctacaggtgctcctggcgaagctccagcaccagctgctgaactgggagagtctgccccatctcctaagggctctagcagcgccgctctgaatggacctacacctggcgctcccgatgatcccatcggcctgtttgttatgaggccccaggatggcgaagtgacagtcggcggcagcatcacctttagcgctagagttgcaggcgccagcctgctgaaacctcctgtggtcaagtggttcaaaggcaaatgggtcgacctgtcctccaaagtgggccagcatctgcagctccacgacagctacgatagagccagcaaggtgtacctgttcgagctgcacatcacagacgcccagccagcctttaccggcagctacagatgtgaagtgtccaccaaggacaagttcgactgcagcaacttcaacctgaccgtgcacgaggccatgggcacaggcgatctggatctgctgagcgcctttcggagaacatctctggctggcggcggaagaagaatcagcgacagccacgaggataccggcatcctggatttcagcagcctgctcaagaagcgggacagcttcagaacccctcgggacagcaaactggaagctcccgccgaggaagatgtctgggagatcctgagacaggcccctcctagcgagtacgagagaatcgcctttcagtacggcgtgaccgacctgagaggcatgctgaagaggctgaagggcatgcgccgggacgagaagaagtccacagccttccagaagaagctggaacccgcctaccaggtgtccaagggccacaagatcagactgaccgtggaactggccgaccacgacgccgaagtgaagtggctgaaaaacggccaagagattcagatgagcggcagcaagtacatcttcgagagcatcggcgccaagcggaccctgacaatcagccagtgtagcctggccgatgacgccgcctatcagtgtgttgttggcggcgagaagtgcagcaccgagctgttcgtgaaagaacctccagtgctgatcacccggcctctggaagatcagctggtcatggtcggacagcgcgtggaattcgagtgcgaggtttccgaagagggcgcccaagtcaaatggctgaaggatggcgtcgagctgaccagagaggaaaccttcaagtaccggttcaagaaggacggccagcggcaccacctgatcatcaatgaagccatgctggaagatgccggccactacgccttgtgtacatctggtggacaggccctggccgagctgattgtgcaagagaagaaactcgaggtgtaccagtctatcgccgacctgatggtcggagccaaagaccaggccgtgttcaagtgcgaagtgtccgacgagaatgtgcgcggcgtgtggctcaagaacggcaaagaactggtgcccgacagccggatcaaggtgtcccacattggcagagtgcacaagctgaccatcgacgacgtgacccctgctgacgaggccgattacagctttgtgcctgagggcttcgcctgtaacctgagcgccaagctgcactttatggaagtcaagatcgacttcgtgccccggcaagagcctcctaagatccacctggattgccctggcagaatccccgacacaatcgtggtggtggccggaaacaagctgagactggatgtgcccatcagcggcgatcctgctcctacagtgatctggcagaaggccatcacacagggcaacaaggcccctgctagacccgctcctgatgctcctgaagataccggcgatagcgacgagtgggtgttcgacaagaaactgctgtgcgagacagagggaagagtgcgagtggaaaccacaaaggaccgcagcatcttcaccgtggaaggcgccgagaaagaggacgagggcgtctacacagtgaccgtgaagaatcccgtgggcgaagatcaagtgaacctgacagtgaaagtcatcgacgtgcccgacgctcctgccgctccaaagatctctaacgtgggagaagatagctgcaccgtgcagtgggagcctccagcttatgatggcggacagcctatcctgggctacatcctggaacgcaagaagaaaaagtcctaccggtggatgcggctgaacttcgatctgatccaagagctgagccacgaagccagacggatgatcgaaggcgtggtgtacgagatgagagtgtacgccgtgaacgccatcggcatgagcagaccttctccagcctctcagcccttcatgcctatcggccctccaagcgaacctacacacctggccgttgaggacgtgtccgataccaccgtgtctctgaaatggcggcctcctgagagagttggagctggcggactggatggctacagcgtggaatactgtccagagggctgtagcgagtgggttgcagctctgcagggactgaccgagcacacctctatcctggtcaaggacctgcctaccggcgctagactgctgtttagagtgcgggcccacaacatggctggaccaggtgcaccagtgaccaccacagaacccgtgacagtgcaagaaatcctgcagcggccaagactgcagctgcccagacacctgaggcagaccatccagaaaaaagtgggcgagcccgtgaacctgctgatcccatttcaaggcaagcccagacctcaagtgacctggaccaaagagggacagcctctggccggcgaagaggtgtccatcagaaacagccccaccgacaccatcctgttcatcagagccgccagaagggtgcactccggcacctatcaagtgactgtgcggatcgagaacatggaagataaggccacactggtgctgcaggtcgtggacaaacccagtcctcctcaggacctgcgcgtgacagatgcctggggactgaatgtggctctggaatggaagcctccacaggacgtgggcaacacagagctgtggggctataccgtgcagaaagccgacaaaaagaccatggaatggttcaccgtgctggaacactaccggcggacccattgtgtggtgcctgagctgatcatcggcaacggctactacttccgggtgttcagccagaatatggtcggattcagcgatagggccgccaccacaaaagaaccagtgttcatccccagacctggcatcacctacgagcctccaaactacaaggccctggacttcagcgaggcccctagctttacacagcccctggtcaacagaagcgtgatcgccggctacaccgccatgctgtgttgtgccgttagaggcagccccaagcctaagatctcctggtttaagaacggcctggacctcggcgaggacgccagattcagaatgttcagcaagcagggcgtgctgaccctggaaatcagaaagccctgtcctttcgacggcggcatctacgtgtgcagagccaccaatctgcagggcgaagctagatgcgagtgcagactggaagttcgggtgccccagtaagcggccgccaataaaggatcgtttattttcattggaagcgtgtgttggttttttgatcaggcgcgtccaagcttgcatgctggggagagatctgcggccgcaggaacccctagtgatggagttggccactccctctctgcgcgctcgctcgctcactgaggccgcccgggcaaagcccgggcgtcgggcgacctttggtcgcccggcctcagtgagcgagcgagcgcgcagagagggagtggccaa

SEQ ID NO: 94 - DNA, 4950 bp, synthetic construct
  source 1..4950: mol_type = other DNA
ctgcgcgctcgctcgctcactgaggccgcccgggcaaagcccgggcgtcgggcgacctttggtcgcccggcctcagtgagcgagcgagcgcgcagagagggagtggccaactccatcactaggggttcctgcggccgcacgcgtctcagtccattaggagccagtagcctggaagatgtctttacccccagcatcagttcaagtggagcagcacataactcttgccctctgccttccaagattctggtgctgagacttatggagtgtcttggaggttgccttctgccccccaaccctgctcccagctggccctcccaggcctgggttgctggcctctgctttatcaggattctcaagagggacagctggtttatgttgcatgactgttccctgcatatctgctctggttttaaatagcttatctgagcagctggaggaccacatgggcttatatggcgtggggtacatgttcctgtagccttgtccctggcacctgccaaaatagcagccaacaccccccacccccaccgccatccccctgccccacccgtcccctgtcgcacattcctccctccgcagggctggctcaccaggccccagcccacatgcctgcttaaagccctctccatcctctgcctcacccagtccccgctgagactgagcagacgcctccaggatctgtcggcagggtttagtgaaccgtcagatcctgcagaagttggtcgtgaggcactagtgggcaggtaagtatcaaggttacaagacaggtttaaggagaccaatagaaactgggcttgtcgagacagagaagactcttgcgtttctgataggcacctattggtcttactgacatccactttgcctttctctccacaggtgtactagtccgccaccatgcctgagcctggaaagaaacctgtgtccgccttcagcaagaagcccagatccgttgaagtggccgctggaagccctgccgtgtttgaggccgaaacagaacgcgctggcgtgaaagttcgatggcagagaggcggcagcgatatcagcgccagcaacaaatatggcctggccaccgagggcaccagacacacactgacagtcagagaagtgggccctgccgatcagggctcttatgccgtgattgccggcagcagcaaagtgaagttcgacctgaaagtgatcgaggccgagaaggccgagcctatgcttgctcctgctccagctcctgctgaagctacaggtgctcctggcgaagctccagcaccagctgctgaactgggagagtctgccccatctcctaagggctctagcagcgccgctctgaatggacctacacctggcgctcccgatgatcccatcggcctgtttgttatgaggccccaggatggcgaagtgacagtcggcggcagcatcacctttagcgctagagttgcaggcgccagcctgctgaaacctcctgtggtcaagtggttcaaaggcaaatgggtcgacctgtcctccaaagtgggccagcatctgcagctccacgacagctacgatagagccagcaaggtgtacctgttcgagctgcacatcacagacgcccagccagcctttaccggcagctacagatgtgaagtgtccaccaaggacaagttcgactgcagcaacttcaacctgaccgtgcacgaggccatgggcacaggcgatctggatctgctgagcgcctttcggagaacatctctggctggcggcggaagaagaatcagcgacagccacgaggataccggcatcctggatttcagcagcctgctcaagaagcgggacagcttcagaacccctcgggacagcaaactggaagctcccgccgaggaagatgtctgggagatcctgagacaggcccctcctagcgagtacgagagaatcgcctttcagtacggcgtgaccgacctgagaggcatgctgaagaggctgaagggcatgcgccgggacgagaagaagtccacagccttccagaagaagctggaacccgcctaccaggtgtccaagggccacaagatcagactgaccgtggaactggccgaccacgacgccgaagtgaagtggctgaaaaacggccaagagattcagatgagcggcagcaagtacatcttcgagagcatcggcgccaagcggaccctgacaatcagccagtgtagcctggccgatgacgccgcctatcagtgtgttgttggcggcgagaagtgcagcaccgagctgttcgtgaaagaacctccagtgctgatcacccggcctctggaagatcagctggtcatggtcggacagcgcgtggaattcgagtgcgaggtttccgaagagggcgcccaagtcaaatggctgaaggatggcgtcgagctgaccagagaggaaaccttcaagtaccggttcaagaaggacggccagcggcaccacctgatcatcaatgaagccatgctggaagatgccggccactacgccttgtgtacatctggtggacaggccctggccgagctgattgtgcaagagaagaaactcgaggtgtaccagtctatcgccgacctgatggtcggagccaaagaccaggccgtgttcaagtgcgaagtgtccgacgagaatgtgcgcggcgtgtggctcaagaacggcaaagaactggtgcccgacagccggatcaaggtgtcccacattggcagagtgcacaagctgaccatcgacgacgtgacccctgctgacgaggccgattacagctttgtgcctgagggcttcgcctgtaacctgagcgccaagctgcactttatggaagtcaagatcgacttcgtgccccggcaagagcctcctaagatccacctggattgccctggcagaatccccgacacaatcgtggtggtggccggaaacaagctgagactggatgtgcccatcagcggcgatcctgctcctacagtgatctggcagaaggccatcacacagggcaacaaggcccctgctagacccgctcctgatgctcctgaagataccggcgatagcgacgagtgggtgttcgacaagaaactgctgtgcgagacagagggaagagtgcgagtggaaaccacaaaggaccgcagcatcttcaccgtggaaggcgccgagaaagaggacgagggcgtctacacagtgaccgtgaagaatcccgtgggcgaagatcaagtgaacctgacagtgaaagtcatcgacgtgcccgacgctcctgccgctccaaagatctctaacgtgggagaagatagctgcaccgtgcagtgggagcctccagcttatgatggcggacagcctatcctgggctacatcctggaacgcaagaagaaaaagtcctaccggtggatgcggctgaacttcgatctgatccaagagctgagccacgaagccagacggatgatcgaaggcgtggtgtacgagatgagagtgtacgccgtgaacgccatcggcatgagcagaccttctccagcctctcagcccttcatgcctatcggccctccaagcgaacctacacacctggccgttgaggacgtgtccgataccaccgtgtctctgaaatggcggcctcctgagagagttggagctggcggactggatggctacagcgtggaatactgtccagagggctgtagcgagtgggttgcagctctgcagggactgaccgagcacacctctatcctggtcaaggacctgcctaccggcgctagactgctgtttagagtgcgggcccacaacatggctggaccaggtgcaccagtgaccaccacagaacccgtgacagtgcaagaaatcctgcagcggccaagactgcagctgcccagacacctgaggcagaccatccagaaaaaagtgggcgagcccgtgaacctgctgatcccatttcaaggcaagcccagacctcaagtgacctggaccaaagagggacagcctctggccggcgaagaggtgtccatcagaaacagccccaccgacaccatcctgttcatcagagccgccagaagggtgcactccggcacctatcaagtgactgtgcggatcgagaacatggaagataaggccacactggtgctgcaggtcgtggacaaacccagtcctcctcaggacctgcgcgtgacagatgcctggggactgaatgtggctctggaatggaagcctccacaggacgtgggcaacacagagctgtggggctataccgtgcagaaagccgacaaaaagaccatggaatggttcaccgtgctggaacactaccggcggacccattgtgtggtgcctgagctgatcatcggcaacggctactacttccgggtgttcagccagaatatggtcggattcagcgatagggccgccaccacaaaagaaccagtgttcatccccagacctggcatcacctacgagcctccaaactacaaggccctggacttcagcgaggcccctagctttacacagcccctggtcaacagaagcgtgatcgccggctacaccgccatgctgtgttgtgccgttagaggcagccccaagcctaagatctcctggtttaagaacggcctggacctcggcgaggacgccagattcagaatgttcagcaagcagggcgtgctgaccctggaaatcagaaagccctgtcctttcgacggcggcatctacgtgtgcagagccaccaatctgcagggcgaagctagatgcgagtgcagactggaagttcgggtgccccagtaagcggccgccaataaaggatcgtttattttcattggaagcgtgtgttggttttttgatcaggcgcgtccaagcttgcatgctggggagagatctgcggccgcaggaacccctagtgatggagttggccactccctctctgcgcgctcgctcgctcactgaggccgcccgggcaaagcccgggcgtcgggcgacctttggtcgcccggcctcagtgagcgagcgagcgcgcag

SEQ ID NO: 95 - DNA, 4980 bp, synthetic construct
  source 1..4980: mol_type = other DNA
ttggccactccctctctgcgcgctcgctcgctcactgaggccgcccgggcaaagcccgggcgtcgggcgacctttggtcgcccggcctcagtgagcgagcgagcgcgcagagagggagtggccaactccatcactaggggttcctgcggccgcacgcgtctcagtccattaggagccagtagcctggaagatgtctttacccccagcatcagttcaagtggagcagcacataactcttgccctctgccttccaagattctggtgctgagacttatggagtgtcttggaggttgccttctgccccccaaccctgctcccagctggccctcccaggcctgggttgctggcctctgctttatcaggattctcaagagggacagctggtttatgttgcatgactgttccctgcatatctgctctggttttaaatagcttatctgagcagctggaggaccacatgggcttatatggcgtggggtacatgttcctgtagccttgtccctggcacctgccaaaatagcagccaacaccccccacccccaccgccatccccctgccccacccgtcccctgtcgcacattcctccctccgcagggctggctcaccaggccccagcccacatgcctgcttaaagccctctccatcctctgcctcacccagtccccgctgagactgagcagacgcctccaggatctgtcggcagggtttagtgaaccgtcagatcctgcagaagttggtcgtgaggcactagtgggcaggtaagtatcaaggttacaagacaggtttaaggagaccaatagaaactgggcttgtcgagacagagaagactcttgcgtttctgataggcacctattggtcttactgacatccactttgcctttctctccacaggtgtactagtccgccaccatgcctgagcctggaaagaaacctgtgtccgccttcagcaagaagcccagatccgttgaagtggccgctggaagccctgccgtgtttgaggccgaaacagaacgcgctggcgtgaaagttcgatggcagagaggcggcagcgatatcagcgccagcaacaaatatggcctggccaccgagggcaccagacacacactgacagtcagagaagtgggccctgccgatcagggctcttatgccgtgattgccggcagcagcaaagtgaagttcgacctgaaagtgatcgaggccgagaaggccgagcctatgcttgctcctgctccagctcctgctgaagctacaggtgctcctggcgaagctccagcaccagctgctgaactgggagagtctgccccatctcctaagggctctagcagcgccgctctgaatggacctacacctggcgctcccgatgatcccatcggcctgtttgttatgaggccccaggatggcgaagtgacagtcggcggcagcatcacctttagcgctagagttgcaggcgccagcctgctgaaacctcctgtggtcaagtggttcaaaggcaaatgggtcgacctgtcctccaaagtgggccagcatctgcagctccacgacagctacgatagagccagcaaggtgtacctgttcgagctgcacatcacagacgcccagccagcctttaccggcagctacagatgtgaagtgtccaccaaggacaagttcgactgcagcaacttcaacctgaccgtgcacgaggccatgggcacaggcgatctggatctgctgagcgcctttcggagaacatctctggctggcggcggaagaagaatcagcgacagccacgaggataccggcatcctggatttcagcagcctgctcaagaagcgggacagcttcagaacccctcgggacagcaaactggaagctcccgccgaggaagatgtctgggagatcctgagacaggcccctcctagcgagtacgagagaatcgcctttcagtacggcgtgaccgacctgagaggcatgctgaagaggctgaagggcatgcgccgggacgagaagaagtccacagccttccagaagaagctggaacccgcctaccaggtgtccaagggccacaagatcagactgaccgtggaactggccgaccacgacgccgaagtgaagtggctgaaaaacggccaagagattcagatgagcggcagcaagtacatcttcgagagcatcggcgccaagcggaccctgacaatcagccagtgtagcctggccgatgacgccgcctatcagtgtgttgttggcggcgagaagtgcagcaccgagctgttcgtgaaagaacctccagtgctgatcacccggcctctggaagatcagctggtcatggtcggacagcgcgtggaattcgagtgcgaggtttccgaagagggcgcccaagtcaaatggctgaaggatggcgtcgagctgaccagagaggaaaccttcaagtaccggttcaagaaggacggccagcggcaccacctgatcatcaatgaagccatgctggaagatgccggccactacgccttgtgtacatctggtggacaggccctggccgagctgattgtgcaagagaagaaactcgaggtgtaccagtctatcgccgacctgatggtcggagccaaagaccaggccgtgttcaagtgcgaagtgtccgacgagaatgtgcgcggcgtgtggctcaagaacggcaaagaactggtgcccgacagccggatcaaggtgtcccacattggcagagtgcacaagctgaccatcgacgacgtgacccctgctgacgaggccgattacagctttgtgcctgagggcttcgcctgtaacctgagcgccaagctgcactttatggaagtcaagatcgacttcgtgccccggcaagagcctcctaagatccacctggattgccctggcagaatccccgacacaatcgtggtggtggccggaaacaagctgagactggatgtgcccatcagcggcgatcctgctcctacagtgatctggcagaaggccatcacacagggcaacaaggcccctgctagacccgctcctgatgctcctgaagataccggcgatagcgacgagtgggtgttcgacaagaaactgctgtgcgagacagagggaagagtgcgagtggaaaccacaaaggaccgcagcatcttcaccgtggaaggcgccgagaaagaggacgagggcgtctacacagtgaccgtgaagaatcccgtgggcgaagatcaagtgaacctgacagtgaaagtcatcgacgtgcccgacgctcctgccgctccaaagatctctaacgtgggagaagatagctgcaccgtgcagtgggagcctccagcttatgatggcggacagcctatcctgggctacatcctggaacgcaagaagaaaaagtcctaccggtggatgcggctgaacttcgatctgatccaagagctgagccacgaagccagacggatgatcgaaggcgtggtgtacgagatgagagtgtacgccgtgaacgccatcggcatgagcagaccttctccagcctctcagcccttcatgcctatcggccctccaagcgaacctacacacctggccgttgaggacgtgtccgataccaccgtgtctctgaaatggcggcctcctgagagagttggagctggcggactggatggctacagcgtggaatactgtccagagggctgtagcgagtgggttgcagctctgcagggactgaccgagcacacctctatcctggtcaaggacctgcctaccggcgctagactgctgtttagagtgcgggcccacaacatggctggaccaggtgcaccagtgaccaccacagaacccgtgacagtgcaagaaatcctgcagcggccaagactgcagctgcccagacacctgaggcagaccatccagaaaaaagtgggcgagcccgtgaacctgctgatcccatttcaaggcaagcccagacctcaagtgacctggaccaaagagggacagcctctggccggcgaagaggtgtccatcagaaacagccccaccgacaccatcctgttcatcagagccgccagaagggtgcactccggcacctatcaagtgactgtgcggatcgagaacatggaagataaggccacactggtgctgcaggtcgtggacaaacccagtcctcctcaggacctgcgcgtgacagatgcctggggactgaatgtggctctggaatggaagcctccacaggacgtgggcaacacagagctgtggggctataccgtgcagaaagccgacaaaaagaccatggaatggttcaccgtgctggaacactaccggcggacccattgtgtggtgcctgagctgatcatcggcaacggctactacttccgggtgttcagccagaatatggtcggattcagcgatagggccgccaccacaaaagaaccagtgttcatccccagacctggcatcacctacgagcctccaaactacaaggccctggacttcagcgaggcccctagctttacacagcccctggtcaacagaagcgtgatcgccggctacaccgccatgctgtgttgtgccgttagaggcagccccaagcctaagatctcctggtttaagaacggcctggacctcggcgaggacgccagattcagaatgttcagcaagcagggcgtgctgaccctggaaatcagaaagccctgtcctttcgacggcggcatctacgtgtgcagagccaccaatctgcagggcgaagctagatgcgagtgcagactggaagttcgggtgccccagtaagcggccgccaataaaggatcgtttattttcattggaagcgtgtgttggttttttgatcaggcgcgtccaagcttgcatgctggggagagatctgcggccgcaggaacccctagtgatggagttggccactccctctctgcgcgctcgctcgctcactgaggccgcccgggcaaagcccgggcgtcgggcgacctttggtcgcccggcctcagtgagcgagcgagcgcgcagagagggagtggccaa

SEQ ID NO: 96 - DNA, 4950 bp, synthetic construct
  source 1..4950: mol_type = other DNA
ctgcgcgctcgctcgctcactgaggccgggcgaccaaaggtcgcccgacgcccgggctttgcccgggcggcctcagtgagcgagcgagcgcgcagagagggagtggccaactccatcactaggggttcctgcggccgcacgcgtctcagtccattaggagccagtagcctggaagatgtctttacccccagcatcagttcaagtggagcagcacataactcttgccctctgccttccaagattctggtgctgagacttatggagtgtcttggaggttgccttctgccccccaaccctgctcccagctggccctcccaggcctgggttgctggcctctgctttatcaggattctcaagagggacagctggtttatgttgcatgactgttccctgcatatctgctctggttttaaatagcttatctgagcagctggaggaccacatgggcttatatggcgtggggtacatgttcctgtagccttgtccctggcacctgccaaaatagcagccaacaccccccacccccaccgccatccccctgccccacccgtcccctgtcgcacattcctccctccgcagggctggctcaccaggccccagcccacatgcctgcttaaagccctctccatcctctgcctcacccagtccccgctgagactgagcagacgcctccaggatctgtcggcagggtttagtgaaccgtcagatcctgcagaagttggtcgtgaggcactagtgggcaggtaagtatcaaggttacaagacaggtttaaggagaccaatagaaactgggcttgtcgagacagagaagactcttgcgtttctgataggcacctattggtcttactgacatccactttgcctttctctccacaggtgtactagtccgccaccatgcctgagcctggaaagaaacctgtgtccgccttcagcaagaagcccagatccgttgaagtggccgctggaagccctgccgtgtttgaggccgaaacagaacgcgctggcgtgaaagttcgatggcagagaggcggcagcgatatcagcgccagcaacaaatatggcctggccaccgagggcaccagacacacactgacagtcagagaagtgggccctgccgatcagggctcttatgccgtgattgccggcagcagcaaagtgaagttcgacctgaaagtgatcgaggccgagaaggccgagcctatgcttgctcctgctccagctcctgctgaagctacaggtgctcctggcgaagctccagcaccagctgctgaactgggagagtctgccccatctcctaagggctctagcagcgccgctctgaatggacctacacctggcgctcccgatgatcccatcggcctgtttgttatgaggccccaggatggcgaagtgacagtcggcggcagcatcacctttagcgctagagttgcaggcgccagcctgctgaaacctcctgtggtcaagtggttcaaaggcaaatgggtcgacctgtcctccaaagtgggccagcatctgcagctccacgacagctacgatagagccagcaaggtgtacctgttcgagctgcacatcacagacgcccagccagcctttaccggcagctacagatgtgaagtgtccaccaaggacaagttcgactgcagcaacttcaacctgaccgtgcacgaggccatgggcacaggcgatctggatctgctgagcgcctttcggagaacatctctggctggcggcggaagaagaatcagcgacagccacgaggataccggcatcctggatttcagcagcctgctcaagaagcgggacagcttcagaacccctcgggacagcaaactggaagctcccgccgaggaagatgtctgggagatcctgagacaggcccctcctagcgagtacgagagaatcgcctttcagtacggcgtgaccgacctgagaggcatgctgaagaggctgaagggcatgcgccgggacgagaagaagtccacagccttccagaagaagctggaacccgcctaccaggtgtccaagggccacaagatcagactgaccgtggaactggccgaccacgacgccgaagtgaagtggctgaaaaacggccaagagattcagatgagcggcagcaagtacatcttcgagagcatcggcgccaagcggaccctgacaatcagccagtgtagcctggccgatgacgccgcctatcagtgtgttgttggcggcgagaagtgcagcaccgagctgttcgtgaaagaacctccagtgctgatcacccggcctctggaagatcagctggtcatggtcggacagcgcgtggaattcgagtgcgaggtttccgaagagggcgcccaagtcaaatggctgaaggatggcgtcgagctgaccagagaggaaaccttcaagtaccggttcaagaaggacggccagcggcaccacctgatcatcaatgaagccatgctggaagatgccggccactacgccttgtgtacatctggtggacaggccctggccgagctgattgtgcaagagaagaaactcgaggtgtaccagtctatcgccgacctgatggtcggagccaaagaccaggccgtgttcaagtgcgaagtgtccgacgagaatgtgcgcggcgtgtggctcaagaacggcaaagaactggtgcccgacagccggatcaaggtgtcccacattggcagagtgcacaagctgaccatcgacgacgtgacccctgctgacgaggccgattacagctttgtgcctgagggcttcgcctgtaacctgagcgccaagctgcactttatggaagtcaagatcgacttcgtgccccggcaagagcctcctaagatccacctggattgccctggcagaatccccgacacaatcgtggtggtggccggaaacaagctgagactggatgtgcccatcagcggcgatcctgctcctacagtgatctggcagaaggccatcacacagggcaacaaggcccctgctagacccgctcctgatgctcctgaagataccggcgatagcgacgagtgggtgttcgacaagaaactgctgtgcgagacagagggaagagtgcgagtggaaaccacaaaggaccgcagcatcttcaccgtggaaggcgccgagaaagaggacgagggcgtctacacagtgaccgtgaagaatcccgtgggcgaagatcaagtgaacctgacagtgaaagtcatcgacgtgcccgacgctcctgccgctccaaagatctctaacgtgggagaagatagctgcaccgtgcagtgggagcctccagcttatgatggcggacagcctatcctgggctacatcctggaacgcaagaagaaaaagtcctaccggtggatgcggctgaacttcgatctgatccaagagctgagccacgaagccagacggatgatcgaaggcgtggtgtacgagatgagagtgtacgccgtgaacgccatcggcatgagcagaccttctccagcctctcagcccttcatgcctatcggccctccaagcgaacctacacacctggccgttgaggacgtgtccgataccaccgtgtctctgaaatggcggcctcctgagagagttggagctggcggactggatggctacagcgtggaatactgtccagagggctgtagcgagtgggttgcagctctgcagggactgaccgagcacacctctatcctggtcaaggacctgcctaccggcgctagactgctgtttagagtgcgggcccacaacatggctggaccaggtgcaccagtgaccaccacagaacccgtgacagtgcaagaaatcctgcagcggccaagactgcagctgcccagacacctgaggcagaccatccagaaaaaagtgggcgagcccgtgaacctgctgatcccatttcaaggcaagcccagacctcaagtgacctggaccaaagagggacagcctctggccggcgaagaggtgtccatcagaaacagccccaccgacaccatcctgttcatcagagccgccagaagggtgcactccggcacctatcaagtgactgtgcggatcgagaacatggaagataaggccacactggtgctgcaggtcgtggacaaacccagtcctcctcaggacctgcgcgtgacagatgcctggggactgaatgtggctctggaatggaagcctccacaggacgtgggcaacacagagctgtggggctataccgtgcagaaagccgacaaaaagaccatggaatggttcaccgtgctggaacactaccggcggacccattgtgtggtgcctgagctgatcatcggcaacggctactacttccgggtgttcagccagaatatggtcggattcagcgatagggccgccaccacaaaagaaccagtgttcatccccagacctggcatcacctacgagcctccaaactacaaggccctggacttcagcgaggcccctagctttacacagcccctggtcaacagaagcgtgatcgccggctacaccgccatgctgtgttgtgccgttagaggcagccccaagcctaagatctcctggtttaagaacggcctggacctcggcgaggacgccagattcagaatgttcagcaagcagggcgtgctgaccctggaaatcagaaagccctgtcctttcgacggcggcatctacgtgtgcagagccaccaatctgcagggcgaagctagatgcgagtgcagactggaagttcgggtgccccagtaagcggccgccaataaaggatcgtttattttcattggaagcgtgtgttggttttttgatcaggcgcgtccaagcttgcatgctggggagagatctgcggccgcaggaacccctagtgatggagttggccactccctctctgcgcgctcgctcgctcactgaggccgggcgaccaaaggtcgcccgacgcccgggctttgcccgggcggcctcagtgagcgagcgagcgcgcag

SEQ ID NO: 97 - DNA, 4980 bp, synthetic construct
  source 1..4980: mol_type = other DNA
ttggccactccctctctgcgcgctcgctcgctcactgaggccgggcgaccaaaggtcgcccgacgcccgggctttgcccgggcggcctcagtgagcgagcgagcgcgcagagagggagtggccaactccatcactaggggttcctgcggccgcacgcgtctcagtccattaggagccagtagcctggaagatgtctttacccccagcatcagttcaagtggagcagcacataactcttgccctctgccttccaagattctggtgctgagacttatggagtgtcttggaggttgccttctgccccccaaccctgctcccagctggccctcccaggcctgggttgctggcctctgctttatcaggattctcaagagggacagctggtttatgttgcatgactgttccctgcatatctgctctggttttaaatagcttatctgagcagctggaggaccacatgggcttatatggcgtggggtacatgttcctgtagccttgtccctggcacctgccaaaatagcagccaacaccccccacccccaccgccatccccctgccccacccgtcccctgtcgcacattcctccctccgcagggctggctcaccaggccccagcccacatgcctgcttaaagccctctccatcctctgcctcacccagtccccgctgagactgagcagacgcctccaggatctgtcggcagggtttagtgaaccgtcagatcctgcagaagttggtcgtgaggcactagtgggcaggtaagtatcaaggttacaagacaggtttaaggagaccaatagaaactgggcttgtcgagacagagaagactcttgcgtttctgataggcacctattggtcttactgacatccactttgcctttctctccacaggtgtactagtccgccaccatgcctgagcctggaaagaaacctgtgtccgccttcagcaagaagcccagatccgttgaagtggccgctggaagccctgccgtgtttgaggccgaaacagaacgcgctggcgtgaaagttcgatggcagagaggcggcagcgatatcagcgccagcaacaaatatggcctggccaccgagggcaccagacacacactgacagtcagagaagtgggccctgccgatcagggctcttatgccgtgattgccggcagcagcaaagtgaagttcgacctgaaagtgatcgaggccgagaaggccgagcctatgcttgctcctgctccagctcctgctgaagctacaggtgctcctggcgaagctccagcaccagctgctgaactgggagagtctgccccatctcctaagggctctagcagcgccgctctgaatggacctacacctggcgctcccgatgatcccatcggcctgtttgttatgaggccccaggatggcgaagtgacagtcggcggcagcatcacctttagcgctagagttgcaggcgccagcctgctgaaacctcctgtggtcaagtggttcaaaggcaaatgggtcgacctgtcctccaaagtgggccagcatctgcagctccacgacagctacgatagagccagcaaggtgtacctgttcgagctgcacatcacagacgcccagccagcctttaccggcagctacagatgtgaagtgtccaccaaggacaagttcgactgcagcaacttcaacctgaccgtgcacgaggccatgggcacaggcgatctggatctgctgagcgcctttcggagaacatctctggctggcggcggaagaagaatcagcgacagccacgaggataccggcatcctggatttcagcagcctgctcaagaagcgggacagcttcagaacccctcgggacagcaaactggaagctcccgccgaggaagatgtctgggagatcctgagacaggcccctcctagcgagtacgagagaatcgcctttcagtacggcgtgaccgacctgagaggcatgctgaagaggctgaagggcatgcgccgggacgagaagaagtccacagccttccagaagaagctggaacccgcctaccaggtgtccaagggccacaagatcagactgaccgtggaactggccgaccacgacgccgaagtgaagtggctgaaaaacggccaagagattcagatgagcggcagcaagtacatcttcgagagcatcggcgccaagcggaccctgacaatcagccagtgtagcctggccgatgacgccgcctatcagtgtgttgttggcggcgagaagtgcagcaccgagctgttcgtgaaagaacctccagtgctgatcacccggcctctggaagatcagctggtcatggtcggacagcgcgtggaattcgagtgcgaggtttccgaagagggcgcccaagtcaaatggctgaaggatggcgtcgagctgaccagagaggaaaccttcaagtaccggttcaagaaggacggccagcggcaccacctgatcatcaatgaagccatgctggaagatgccggccactacgccttgtgtacatctggtggacaggccctggccgagctgattgtgcaagagaagaaactcgaggtgtaccagtctatcgccgacctgatggtcggagccaaagaccaggccgtgttcaagtgcgaagtgtccgacgagaatgtgcgcggcgtgtggctcaagaacggcaaagaactggtgcccgacagccggatcaaggtgtcccacattggcagagtgcacaagctgaccatcgacgacgtgacccctgctgacgaggccgattacagctttgtgcctgagggcttcgcctgtaacctgagcgccaagctgcactttatggaagtcaagatcgacttcgtgccccggcaagagcctcctaagatccacctggattgccctggcagaatccccgacacaatcgtggtggtggccggaaacaagctgagactggatgtgcccatcagcggcgatcctgctcctacagtgatctggcagaaggccatcacacagggcaacaaggcccctgctagacccgctcctgatgctcctgaagataccggcgatagcgacgagtgggtgttcgacaagaaactgctgtgcgagacagagggaagagtgcgagtggaaaccacaaaggaccgcagcatcttcaccgtggaaggcgccgagaaagaggacgagggcgtctacacagtgaccgtgaagaatcccgtgggcgaagatcaagtgaacctgacagtgaaagtcatcgacgtgcccgacgctcctgccgctccaaagatctctaacgtgggagaagatagctgcaccgtgcagtgggagcctccagcttatgatggcggacagcctatcctgggctacatcctggaacgcaagaagaaaaagtcctaccggtggatgcggctgaacttcgatctgatccaagagctgagccacgaagccagacggatgatcgaaggcgtggtgtacgagatgagagtgtacgccgtgaacgccatcggcatgagcagaccttctccagcctctcagcccttcatgcctatcggccctccaagcgaacctacacacctggccgttgaggacgtgtccgataccaccgtgtctctgaaatggcggcctcctgagagagttggagctggcggactggatggctacagcgtggaatactgtccagagggctgtagcgagtgggttgcagctctgcagggactgaccgagcacacctctatcctggtcaaggacctgcctaccggcgctagactgctgtttagagtgcgggcccacaacatggctggaccaggtgcaccagtgaccaccacagaacccgtgacagtgcaagaaatcctgcagcggccaagactgcagctgcccagacacctgaggcagaccatccagaaaaaagtgggcgagcccgtgaacctgctgatcccatttcaaggcaagcccagacctcaagtgacctggaccaaagagggacagcctctggccggcgaagaggtgtccatcagaaacagccccaccgacaccatcctgttcatcagagccgccagaagggtgcactccggcacctatcaagtgactgtgcggatcgagaacatggaagataaggccacactggtgctgcaggtcgtggacaaacccagtcctcctcaggacctgcgcgtgacagatgcctggggactgaatgtggctctggaatggaagcctccacaggacgtgggcaacacagagctgtggggctataccgtgcagaaagccgacaaaaagaccatggaatggttcaccgtgctggaacactaccggcggacccattgtgtggtgcctgagctgatcatcggcaacggctactacttccgggtgttcagccagaatatggtcggattcagcgatagggccgccaccacaaaagaaccagtgttcatccccagacctggcatcacctacgagcctccaaactacaaggccctggacttcagcgaggcccctagctttacacagcccctggtcaacagaagcgtgatcgccggctacaccgccatgctgtgttgtgccgttagaggcagccccaagcctaagatctcctggtttaagaacggcctggacctcggcgaggacgccagattcagaatgttcagcaagcagggcgtgctgaccctggaaatcagaaagccctgtcctttcgacggcggcatctacgtgtgcagagccaccaatctgcagggcgaagctagatgcgagtgcagactggaagttcgggtgccccagtaagcggccgccaataaaggatcgtttattttcattggaagcgtgtgttggttttttgatcaggcgcgtccaagcttgcatgctggggagagatctgcggccgcaggaacccctagtgatggagttggccactccctctctgcgcgctcgctcgctcactgaggccgggcgaccaaaggtcgcccgacgcccgggctttgcccgggcggcctcagtgagcgagcgagcgcgcagagagggagtggccaa

SEQ ID NO: 98 - DNA, 4801 bp, synthetic construct
  source 1..4801: mol_type = other DNA
ctgcgcgctcgctcgctcactgaggccgggcgaccaaaggtcgcccgacgcccgggctttgcccgggcggcctcagtgagcgagcgagcgcgcagagagggagtggccaactccatcactaggggttcctgcggccgcacgcgtctcagtccattaggagccagtagcctggaagatgtctttacccccagcatcagttcaagtggagcagcacataactcttgccctctgccttccaagattctggtgctgagacttatggagtgtcttggaggttgccttctgccccccaaccctgctcccagctggccctcccaggcctgggttgctggcctctgctttatcaggattctcaagagggacagctggtttatgttgcatgactgttccctgcatatctgctctggttttaaatagcttatctgagcagctggaggaccacatgggcttatatggcgtggggtacatgttcctgtagccttgtccctggcacctgccaaaatagcagccaacaccccccacccccaccgccatccccctgccccacccgtcccctgtcgcacattcctccctccgcagggctggctcaccaggccccagcccacatgcctgcttaaagccctctccatcctctgcctcacccagtccccgctgagactgagcagacgcctccaggatctgtcggcagggtttagtgaaccgtcagatcctgcagaagttggtcgtgaggcactagtccgccaccatgcctgagcctggaaagaaacctgtgtccgccttcagcaagaagcccagatccgttgaagtggccgctggaagccctgccgtgtttgaggccgaaacagaacgcgctggcgtgaaagttcgatggcagagaggcggcagcgatatcagcgccagcaacaaatatggcctggccaccgagggcaccagacacacactgacagtcagagaagtgggccctgccgatcagggctcttatgccgtgattgccggcagcagcaaagtgaagttcgacctgaaagtgatcgaggccgagaaggccgagcctatgcttgctcctgctccagctcctgctgaagctacaggtgctcctggcgaagctccagcaccagctgctgaactgggagagtctgccccatctcctaagggctctagcagcgccgctctgaatggacctacacctggcgctcccgatgatcccatcggcctgtttgttatgaggccccaggatggcgaagtgacagtcggcggcagcatcacctttagcgctagagttgcaggcgccagcctgctgaaacctcctgtggtcaagtggttcaaaggcaaatgggtcgacctgtcctccaaagtgggccagcatctgcagctccacgacagctacgatagagccagcaaggtgtacctgttcgagctgcacatcacagacgcccagccagcctttaccggcagctacagatgtgaagtgtccaccaaggacaagttcgactgcagcaacttcaacctgaccgtgcacgaggccatgggcacaggcgatctggatctgctgagcgcctttcggagaacatctctggctggcggcggaagaagaatcagcgacagccacgaggataccggcatcctggatttcagcagcctgctcaagaagcgggacagcttcagaacccctcgggacagcaaactggaagctcccgccgaggaagatgtctgggagatcctgagacaggcccctcctagcgagtacgagagaatcgcctttcagtacggcgtgaccgacctgagaggcatgctgaagaggctgaagggcatgcgccgggacgagaagaagtccacagccttccagaagaagctggaacccgcctaccaggtgtccaagggccacaagatcagactgaccgtggaactggccgaccacgacgccgaagtgaagtggctgaaaaacggccaagagattcagatgagcggcagcaagtacatcttcgagagcatcggcgccaagcggaccctgacaatcagccagtgtagcctggccgatgacgccgcctatcagtgtgttgttggcggcgagaagtgcagcaccgagctgttcgtgaaagaacctccagtgctgatcacccggcctctggaagatcagctggtcatggtcggacagcgcgtggaattcgagtgcgaggtttccgaagagggcgcccaagtcaaatggctgaaggatggcgtcgagctgaccagagaggaaaccttcaagtaccggttcaagaaggacggccagcggcaccacctgatcatcaatgaagccatgctggaagatgccggccactacgccttgtgtacatctggtggacaggccctggccgagctgattgtgcaagagaagaaactcgaggtgtaccagtctatcgccgacctgatggtcggagccaaagaccaggccgtgttcaagtgcgaagtgtccgacgagaatgtgcgcggcgtgtggctcaagaacggcaaagaactggtgcccgacagccggatcaaggtgtcccacattggcagagtgcacaagctgaccatcgacgacgtgacccctgctgacgaggccgattacagctttgtgcctgagggcttcgcctgtaacctgagcgccaagctgcactttatggaagtcaagatcgacttcgtgccccggcaagagcctcctaagatccacctggattgccctggcagaatccccgacacaatcgtggtggtggccggaaacaagctgagactggatgtgcccatcagcggcgatcctgctcctacagtgatctggcagaaggccatcacacagggcaacaaggcccctgctagacccgctcctgatgctcctgaagataccggcgatagcgacgagtgggtgttcgacaagaaactgctgtgcgagacagagggaagagtgcgagtggaaaccacaaaggaccgcagcatcttcaccgtggaaggcgccgagaaagaggacgagggcgtctacacagtgaccgtgaagaatcccgtgggcgaagatcaagtgaacctgacagtgaaagtcatcgacgtgcccgacgctcctgccgctccaaagatctctaacgtgggagaagatagctgcaccgtgcagtgggagcctccagcttatgatggcggacagcctatcctgggctacatcctggaacgcaagaagaaaaagtcctaccggtggatgcggctgaacttcgatctgatccaagagctgagccacgaagccagacggatgatcgaaggcgtggtgtacgagatgagagtgtacgccgtgaacgccatcggcatgagcagaccttctccagcctctcagcccttcatgcctatcggccctccaagcgaacctacacacctggccgttgaggacgtgtccgataccaccgtgtctctgaaatggcggcctcctgagagagttggagctggcggactggatggctacagcgtggaatactgtccagagggctgtagcgagtgggttgcagctctgcagggactgaccgagcacacctctatcctggtcaaggacctgcctaccggcgctagactgctgtttagagtgcgggcccacaacatggctggaccaggtgcaccagtgaccaccacagaacccgtgacagtgcaagaaatcctgcagcggccaagactgcagctgcccagacacctgaggcagaccatccagaaaaaagtgggcgagcccgtgaacctgctgatcccatttcaaggcaagcccagacctcaagtgacctggaccaaagagggacagcctctggccggcgaagaggtgtccatcagaaacagccccaccgacaccatcctgttcatcagagccgccagaagggtgcactccggcacctatcaagtgactgtgcggatcgagaacatggaagataaggccacactggtgctgcaggtcgtggacaaacccagtcctcctcaggacctgcgcgtgacagatgcctggggactgaatgtggctctggaatggaagcctccacaggacgtgggcaacacagagctgtggggctataccgtgcagaaagccgacaaaaagaccatggaatggttcaccgtgctggaacactaccggcggacccattgtgtggtgcctgagctgatcatcggcaacggctactacttccgggtgttcagccagaatatggtcggattcagcgatagggccgccaccacaaaagaaccagtgttcatccccagacctggcatcacctacgagcctccaaactacaaggccctggacttcagcgaggcccctagctttacacagcccctggtcaacagaagcgtgatcgccggctacaccgccatgctgtgttgtgccgttagaggcagccccaagcctaagatctcctggtttaagaacggcctggacctcggcgaggacgccagattcagaatgttcagcaagcagggcgtgctgaccctggaaatcagaaagccctgtcctttcgacggcggcatctacgtgtgcagagccaccaatctgcagggcgaagctagatgcgagtgcagactggaagttcgggtgccccagtaagcggccgccaataaaggatcgtttattttcattggaagcgtgtgttggttttttgatcaggcgcgtccaagcttgcatgctggggagagatctgcggccgcaggaacccctagtgatggagttggccactccctctctgcgcgctcgctcgctcactgaggccgcccgggcaaagcccgggcgtcgggcgacctttggtcgcccggcctcagtgagcgagcgagcgcgcag

SEQ ID NO: 99 - DNA, 4831 bp, synthetic construct
  source 1..4831: mol_type = other DNA
ttggccactccctctctgcgcgctcgctcgctcactgaggccgggcgaccaaaggtcgcccgacgcccgggctttgcccgggcggcctcagtgagcgagcgagcgcgcagagagggagtggccaactccatcactaggggttcctgcggccgcacgcgtctcagtccattaggagccagtagcctggaagatgtctttacccccagcatcagttcaagtggagcagcacataactcttgccctctgccttccaagattctggtgctgagacttatggagtgtcttggaggttgccttctgccccccaaccctgctcccagctggccctcccaggcctgggttgctggcctctgctttatcaggattctcaagagggacagctggtttatgttgcatgactgttccctgcatatctgctctggttttaaatagcttatctgagcagctggaggaccacatgggcttatatggcgtggggtacatgttcctgtagccttgtccctggcacctgccaaaatagcagccaacaccccccacccccaccgccatccccctgccccacccgtcccctgtcgcacattcctccctccgcagggctggctcaccaggccccagcccacatgcctgcttaaagccctctccatcctctgcctcacccagtccccgctgagactgagcagacgcctccaggatctgtcggcagggtttagtgaaccgtcagatcctgcagaagttggtcgtgaggcactagtccgccaccatgcctgagcctggaaagaaacctgtgtccgccttcagcaagaagcccagatccgttgaagtggccgctggaagccctgccgtgtttgaggccgaaacagaacgcgctggcgtgaaagttcgatggcagagaggcggcagcgatatcagcgccagcaacaaatatggcctggccaccgagggcaccagacacacactgacagtcagagaagtgggccctgccgatcagggctcttatgccgtgattgccggcagcagcaaagtgaagttcgacctgaaagtgatcgaggccgagaaggccgagcctatgcttgctcctgctccagctcctgctgaagctacaggtgctcctggcgaagctccagcaccagctgctgaactgggagagtctgccccatctcctaagggctctagcagcgccgctctgaatggacctacacctggcgctcccgatgatcccatcggcctgtttgttatgaggccccaggatggcgaagtgacagtcggcggcagcatcacctttagcgctagagttgcaggcgccagcctgctgaaacctcctgtggtcaagtggttcaaaggcaaatgggtcgacctgtcctccaaagtgggccagcatctgcagctccacgacagctacgatagagccagcaaggtgtacctgttcgagctgcacatcacagacgcccagccagcctttaccggcagctacagatgtgaagtgtccaccaaggacaagttcgactgcagcaacttcaacctgaccgtgcacgaggccatgggcacaggcgatctggatctgctgagcgcctttcggagaacatctctggctggcggcggaagaagaatcagcgacagccacgaggataccggcatcctggatttcagcagcctgctcaagaagcgggacagcttcagaacccctcgggacagcaaactggaagctcccgccgaggaagatgtctgggagatcctgagacaggcccctcctagcgagtacgagagaatcgcctttcagtacggcgtgaccgacctgagaggcatgctgaagaggctgaagggcatgcgccgggacgagaagaagtccacagccttccagaagaagctggaacccgcctaccaggtgtccaagggccacaagatcagactgaccgtggaactggccgaccacgacgccgaagtgaagtggctgaaaaacggccaagagattcagatgagcggcagcaagtacatcttcgagagcatcggcgccaagcggaccctgacaatcagccagtgtagcctggccgatgacgccgcctatcagtgtgttgttggcggcgagaagtgcagcaccgagctgttcgtgaaagaacctccagtgctgatcacccggcctctggaagatcagctggtcatggtcggacagcgcgtggaattcgagtgcgaggtttccgaagagggcgcccaagtcaaatggctgaaggatggcgtcgagctgaccagagaggaaaccttcaagtaccggttcaagaaggacggccagcggcaccacctgatcatcaatgaagccatgctggaagatgccggccactacgccttgtgtacatctggtggacaggccctggccgagctgattgtgcaagagaagaaactcgaggtgtaccagtctatcgccgacctgatggtcggagccaaagaccaggccgtgttcaagtgcgaagtgtccgacgagaatgtgcgcggcgtgtggctcaagaacggcaaagaactggtgcccgacagccggatcaaggtgtcccacattggcagagtgcacaagctgaccatcgacgacgtgacccctgctgacgaggccgattacagctttgtgcctgagggcttcgcctgtaacctgagcgccaagctgcactttatggaagtcaagatcgacttcgtgccccggcaagagcctcctaagatccacctggattgccctggcagaatccccgacacaatcgtggtggtggccggaaacaagctgagactggatgtgcccatcagcggcgatcctgctcctacagtgatctggcagaaggccatcacacagggcaacaaggcccctgctagacccgctcctgatgctcctgaagataccggcgatagcgacgagtgggtgttcgacaagaaactgctgtgcgagacagagggaagagtgcgagtggaaaccacaaaggaccgcagcatcttcaccgtggaaggcgccgagaaagaggacgagggcgtctacacagtgaccgtgaagaatcccgtgggcgaagatcaagtgaacctgacagtgaaagtcatcgacgtgcccgacgctcctgccgctccaaagatctctaacgtgggagaagatagctgcaccgtgcagtgggagcctccagcttatgatggcggacagcctatcctgggctacatcctggaacgcaagaagaaaaagtcctaccggtggatgcggctgaacttcgatctgatccaagagctgagccacgaagccagacggatgatcgaaggcgtggtgtacgagatgagagtgtacgccgtgaacgccatcggcatgagcagaccttctccagcctctcagcccttcatgcctatcggccctccaagcgaacctacacacctggccgttgaggacgtgtccgataccaccgtgtctctgaaatggcggcctcctgagagagttggagctggcggactggatggctacagcgtggaatactgtccagagggctgtagcgagtgggttgcagctctgcagggactgaccgagcacacctctatcctggtcaaggacctgcctaccggcgctagactgctgtttagagtgcgggcccacaacatggctggaccaggtgcaccagtgaccaccacagaacccgtgacagtgcaagaaatcctgcagcggccaagactgcagctgcccagacacctgaggcagaccatccagaaaaaagtgggcgagcccgtgaacctgctgatcccatttcaaggcaagcccagacctcaagtgacctggaccaaagagggacagcctctggccggcgaagaggtgtccatcagaaacagccccaccgacaccatcctgttcatcagagccgccagaagggtgcactccggcacctatcaagtgactgtgcggatcgagaacatggaagataaggccacactggtgctgcaggtcgtggacaaacccagtcctcctcaggacctgcgcgtgacagatgcctggggactgaatgtggctctggaatggaagcctccacaggacgtgggcaacacagagctgtggggctataccgtgcagaaagccgacaaaaagaccatggaatggttcaccgtgctggaacactaccggcggacccattgtgtggtgcctgagctgatcatcggcaacggctactacttccgggtgttcagccagaatatggtcggattcagcgatagggccgccaccacaaaagaaccagtgttcatccccagacctggcatcacctacgagcctccaaactacaaggccctggacttcagcgaggcccctagctttacacagcccctggtcaacagaagcgtgatcgccggctacaccgccatgctgtgttgtgccgttagaggcagccccaagcctaagatctcctggtttaagaacggcctggacctcggcgaggacgccagattcagaatgttcagcaagcagggcgtgctgaccctggaaatcagaaagccctgtcctttcgacggcggcatctacgtgtgcagagccaccaatctgcagggcgaagctagatgcgagtgcagactggaagttcgggtgccccagtaagcggccgccaataaaggatcgtttattttcattggaagcgtgtgttggttttttgatcaggcgcgtccaagcttgcatgctggggagagatctgcggccgcaggaacccctagtgatggagttggccactccctctctgcgcgctcgctcgctcactgaggccgcccgggcaaagcccgggcgtcgggcgacctttggtcgcccggcctcagtgagcgagcgagcgcgcagagagggagtggccaa

SEQ ID NO: 100 - DNA, 4801 bp, synthetic construct
  source 1..4801: mol_type = other DNA
ctgcgcgctcgctcgctcactgaggccgcccgggcaaagcccgggcgtcgggcgacctttggtcgcccggcctcagtgagcgagcgagcgcgcagagagggagtggccaactccatcactaggggttcctgcggccgcacgcgtctcagtccattaggagccagtagcctggaagatgtctttacccccagcatcagttcaagtggagcagcacataactcttgccctctgccttccaagattctggtgctgagacttatggagtgtcttggaggttgccttctgccccccaaccctgctcccagctggccctcccaggcctgggttgctggcctctgctttatcaggattctcaagagggacagctggtttatgttgcatgactgttccctgcatatctgctctggttttaaatagcttatctgagcagctggaggaccacatgggcttatatggcgtggggtacatgttcctgtagccttgtccctggcacctgccaaaatagcagccaacaccccccacccccaccgccatccccctgccccacccgtcccctgtcgcacattcctccctccgcagggctggctcaccaggccccagcccacatgcctgcttaaagccctctccatcctctgcctcacccagtccccgctgagactgagcagacgcctccaggatctgtcggcagggtttagtgaaccgtcagatcctgcagaagttggtcgtgaggcactagtccgccaccatgcctgagcctggaaagaaacctgtgtccgccttcagcaagaagcccagatccgttgaagtggccgctggaagccctgccgtgtttgaggccgaaacagaacgcgctggcgtgaaagttcgatggcagagaggcggcagcgatatcagcgccagcaacaaatatggcctggccaccgagggcaccagacacacactgacagtcagagaagtgggccctgccgatcagggctcttatgccgtgattgccggcagcagcaaagtgaagttcgacctgaaagtgatcgaggccgagaaggccgagcctatgcttgctcctgctccagctcctgctgaagctacaggtgctcctggcgaagctccagcaccagctgctgaactgggagagtctgccccatctcctaagggctctagcagcgccgctctgaatggacctacacctggcgctcccgatgatcccatcggcctgtttgttatgaggccccaggatggcgaagtgacagtcggcggcagcatcacctttagcgctagagttgcaggcgccagcctgctgaaacctcctgtggtcaagtggttcaaaggcaaatgggtcgacctgtcctccaaagtgggccagcatctgcagctccacgacagctacgatagagccagcaaggtgtacctgttcgagctgcacatcacagacgcccagccagcctttaccggcagctacagatgtgaagtgtccaccaaggacaagttcgactgcagcaacttcaacctgaccgtgcacgaggccatgggcacaggcgatctggatctgctgagcgcctttcggagaacatctctggctggcggcggaagaagaatcagcgacagccacgaggataccggcatcctggatttcagcagcctgctcaagaagcgggacagcttcagaacccctcgggacagcaaactggaagctcccgccgaggaagatgtctgggagatcctgagacaggcccctcctagcgagtacgagagaatcgcctttcagtacggcgtgaccgacctgagaggcatgctgaagaggctgaagggcatgcgccgggacgagaagaagtccacagccttccagaagaagctggaacccgcctaccaggtgtccaagggccacaagatcagactgaccgtggaactggccgaccacgacgccgaagtgaagtggctgaaaaacggccaagagattcagatgagcggcagcaagtacatcttcgagagcatcggcgccaagcggaccctgacaatcagccagtgtagcctggccgatgacgccgcctatcagtgtgttgttggcggcgagaagtgcagcaccgagctgttcgtgaaagaacctccagtgctgatcacccggcctctggaagatcagctggtcatggtcggacagcgcgtggaattcgagtgcgaggtttccgaagagggcgcccaagtcaaatggctgaaggatggcgtcgagctgaccagagaggaaaccttcaagtaccggttcaagaaggacggccagcggcaccacctgatcatcaatgaagccatgctggaagatgccggccactacgccttgtgtacatctggtggacaggccctggccgagctgattgtgcaagagaagaaactcgaggtgtaccagtctatcgccgacctgatggtcggagccaaagaccaggccgtgttcaagtgcgaagtgtccgacgagaatgtgcgcggcgtgtggctcaagaacggcaaagaactggtgcccgacagccggatcaaggtgtcccacattggcagagtgcacaagctgaccatcgacgacgtgacccctgctgacgaggccgattacagctttgtgcctgagggcttcgcctgtaacctgagcgccaagctgcactttatggaagtcaagatcgacttcgtgccccggcaagagcctcctaagatccacctggattgccctggcagaatccccgacacaatcgtggtggtggccggaaacaagctgagactggatgtgcccatcagcggcgatcctgctcctacagtgatctggcagaaggccatcacacagggcaacaaggcccctgctagacccgctcctgatgctcctgaagataccggcgatagcgacgagtgggtgttcgacaagaaactgctgtgcgagacagagggaagagtgcgagtggaaaccacaaaggaccgcagcatcttcaccgtggaaggcgccgagaaagaggacgagggcgtctacacagtgaccgtgaagaatcccgtgggcgaagatcaagtgaacctgacagtgaaagtcatcgacgtgcccgacgctcctgccgctccaaagatctctaacgtgggagaagatagctgcaccgtgcagtgggagcctccagcttatgatggcggacagcctatcctgggctacatcctggaacgcaagaagaaaaagtcctaccggtggatgcggctgaacttcgatctgatccaagagctgagccacgaagccagacggatgatcgaaggcgtggtgtacgagatgagagtgtacgccgtgaacgccatcggcatgagcagaccttctccagcctctcagcccttcatgcctatcggccctccaagcgaacctacacacctggccgttgaggacgtgtccgataccaccgtgtctctgaaatggcggcctcctgagagagttggagctggcggactggatggctacagcgtggaatactgtccagagggctgtagcgagtgggttgcagctctgcagggactgaccgagcacacctctatcctggtcaaggacctgcctaccggcgctagactgctgtttagagtgcgggcccacaacatggctggaccaggtgcaccagtgaccaccacagaacccgtgacagtgcaagaaatcctgcagcggccaagactgcagctgcccagacacctgaggcagaccatccagaaaaaagtgggcgagcccgtgaacctgctgatcccatttcaaggcaagcccagacctcaagtgacctggaccaaagagggacagcctctggccggcgaagaggtgtccatcagaaacagccccaccgacaccatcctgttcatcagagccgccagaagggtgcactccggcacctatcaagtgactgtgcggatcgagaacatggaagataaggccacactggtgctgcaggtcgtggacaaacccagtcctcctcaggacctgcgcgtgacagatgcctggggactgaatgtggctctggaatggaagcctccacaggacgtgggcaacacagagctgtggggctataccgtgcagaaagccgacaaaaagaccatggaatggttcaccgtgctggaacactaccggcggacccattgtgtggtgcctgagctgatcatcggcaacggctactacttccgggtgttcagccagaatatggtcggattcagcgatagggccgccaccacaaaagaaccagtgttcatccccagacctggcatcacctacgagcctccaaactacaaggccctggacttcagcgaggcccctagctttacacagcccctggtcaacagaagcgtgatcgccggctacaccgccatgctgtgttgtgccgttagaggcagccccaagcctaagatctcctggtttaagaacggcctggacctcggcgaggacgccagattcagaatgttcagcaagcagggcgtgctgaccctggaaatcagaaagccctgtcctttcgacggcggcatctacgtgtgcagagccaccaatctgcagggcgaagctagatgcgagtgcagactggaagttcgggtgccccagtaagcggccgccaataaaggatcgtttattttcattggaagcgtgtgttggttttttgatcaggcgcgtccaagcttgcatgctggggagagatctgcggccgcaggaacccctagtgatggagttggccactccctctctgcgcgctcgctcgctcactgaggccgcccgggcaaagcccgggcgtcgggcgacctttggtcgcccggcctcagtgagcgagcgagcgcgcag

SEQ ID NO: 101 - DNA, 4831 bp, synthetic construct
  source 1..4831: mol_type = other DNA
ttggccactccctctctgcgcgctcgctcgctcactgaggccgcccgggcaaagcccgggcgtcgggcgacctttggtcgcccggcctcagtgagcgagcgagcgcgcagagagggagtggccaactccatcactaggggttcctgcggccgcacgcgtctcagtccattaggagccagtagcctggaagatgtctttacccccagcatcagttcaagtggagcagcacataactcttgccctctgccttccaagattctggtgctgagacttatggagtgtcttggaggttgccttctgccccccaaccctgctcccagctggccctcccaggcctgggttgctggcctctgctttatcaggattctcaagagggacagctggtttatgttgcatgactgttccctgcatatctgctctggttttaaatagcttatctgagcagctggaggaccacatgggcttatatggcgtggggtacatgttcctgtagccttgtccctggcacctgccaaaatagcagccaacaccccccacccccaccgccatccccctgccccacccgtcccctgtcgcacattcctccctccgcagggctggctcaccaggccccagcccacatgcctgcttaaagccctctccatcctctgcctcacccagtccccgctgagactgagcagacgcctccaggatctgtcggcagggtttagtgaaccgtcagatcctgcagaagttggtcgtgaggcactagtccgccaccatgcctgagcctggaaagaaacctgtgtccgccttcagcaagaagcccagatccgttgaagtggccgctggaagccctgccgtgtttgaggccgaaacagaacgcgctggcgtgaaagttcgatggcagagaggcggcagcgatatcagcgccagcaacaaatatggcctggccaccgagggcaccagacacacactgacagtcagagaagtgggccctgccgatcagggctcttatgccgtgattgccggcagcagcaaagtgaagttcgacctgaaagtgatcgaggccgagaaggccgagcctatgcttgctcctgctccagctcctgctgaagctacaggtgctcctggcgaagctccagcaccagctgctgaactgggagagtctgccccatctcctaagggctctagcagcgccgctctgaatggacctacacctggcgctcccgatgatcccatcggcctgtttgttatgaggccccaggatggcgaagtgacagtcggcggcagcatcacctttagcgctagagttgcaggcgccagcctgctgaaacctcctgtggtcaagtggttcaaaggcaaatgggtcgacctgtcctccaaagtgggccagcatctgcagctccacgacagctacgatagagccagcaaggtgtacctgttcgagctgcacatcacagacgcccagccagcctttaccggcagctacagatgtgaagtgtccaccaaggacaagttcgactgcagcaacttcaacctgaccgtgcacgaggccatgggcacaggcgatctggatctgctgagcgcctttcggagaacatctctggctggcggcggaagaagaatcagcgacagccacgaggataccggcatcctggatttcagcagcctgctcaagaagcgggacagcttcagaacccctcgggacagcaaactggaagctcccgccgaggaagatgtctgggagatcctgagacaggcccctcctagcgagtacgagagaatcgcctttcagtacggcgtgaccgacctgagaggcatgctgaagaggctgaagggcatgcgccgggacgagaagaagtccacagccttccagaagaagctggaacccgcctaccaggtgtccaagggccacaagatcagactgaccgtggaactggccgaccacgacgccgaagtgaagtggctgaaaaacggccaagagattcagatgagcggcagcaagtacatcttcgagagcatcggcgccaagcggaccctgacaatcagccagtgtagcctggccgatgacgccgcctatcagtgtgttgttggcggcgagaagtgcagcaccgagctgttcgtgaaagaacctccagtgctgatcacccggcctctggaagatcagctggtcatggtcggacagcgcgtggaattcgagtgcgaggtttccgaagagggcgcccaagtcaaatggctgaaggatggcgtcgagctgaccagagaggaaaccttcaagtaccggttcaagaaggacggccagcggcaccacctgatcatcaatgaagccatgctggaagatgccggccactacgccttgtgtacatctggtggacaggccctggccgagctgattgtgcaagagaagaaactcgaggtgtaccagtctatcgccgacctgatggtcggagccaaagaccaggccgtgttcaagtgcgaagtgtccgacgagaatgtgcgcggcgtgtggctcaagaacggcaaagaactggtgcccgacagccggatcaaggtgtcccacattggcagagtgcacaagctgaccatcgacgacgtgacccctgctgacgaggccgattacagctttgtgcctgagggcttcgcctgtaacctgagcgccaagctgcactttatggaagtcaagatcgacttcgtgccccggcaagagcctcctaagatccacctggattgccctggcagaatccccgacacaatcgtggtggtggccggaaacaagctgagactggatgtgcccatcagcggcgatcctgctcctacagtgatctggcagaaggccatcacacagggcaacaaggcccctgctagacccgctcctgatgctcctgaagataccggcgatagcgacgagtgggtgttcgacaagaaactgctgtgcgagacagagggaagagtgcgagtggaaaccacaaaggaccgcagcatcttcaccgtggaaggcgccgagaaagaggacgagggcgtctacacagtgaccgtgaagaatcccgtgggcgaagatcaagtgaacctgacagtgaaagtcatcgacgtgcccgacgctcctgccgctccaaagatctctaacgtgggagaagatagctgcaccgtgcagtgggagcctccagcttatgatggcggacagcctatcctgggctacatcctggaacgcaagaagaaaaagtcctaccggtggatgcggctgaacttcgatctgatccaagagctgagccacgaagccagacggatgatcgaaggcgtggtgtacgagatgagagtgtacgccgtgaacgccatcggcatgagcagaccttctccagcctctcagcccttcatgcctatcggccctccaagcgaacctacacacctggccgttgaggacgtgtccgataccaccgtgtctctgaaatggcggcctcctgagagagttggagctggcggactggatggctacagcgtggaatactgtccagagggctgtagcgagtgggttgcagctctgcagggactgaccgagcacacctctatcctggtcaaggacctgcctaccggcgctagactgctgtttagagtgcgggcccacaacatggctggaccaggtgcaccagtgaccaccacagaacccgtgacagtgcaagaaatcctgcagcggccaagactgcagctgcccagacacctgaggcagaccatccagaaaaaagtgggcgagcccgtgaacctgctgatcccatttcaaggcaagcccagacctcaagtgacctggaccaaagagggacagcctctggccggcgaagaggtgtccatcagaaacagccccaccgacaccatcctgttcatcagagccgccagaagggtgcactccggcacctatcaagtgactgtgcggatcgagaacatggaagataaggccacactggtgctgcaggtcgtggacaaacccagtcctcctcaggacctgcgcgtgacagatgcctggggactgaatgtggctctggaatggaagcctccacaggacgtgggcaacacagagctgtggggctataccgtgcagaaagccgacaaaaagaccatggaatggttcaccgtgctggaacactaccggcggacccattgtgtggtgcctgagctgatcatcggcaacggctactacttccgggtgttcagccagaatatggtcggattcagcgatagggccgccaccacaaaagaaccagtgttcatccccagacctggcatcacctacgagcctccaaactacaaggccctggacttcagcgaggcccctagctttacacagcccctggtcaacagaagcgtgatcgccggctacaccgccatgctgtgttgtgccgttagaggcagccccaagcctaagatctcctggtttaagaacggcctggacctcggcgaggacgccagattcagaatgttcagcaagcagggcgtgctgaccctggaaatcagaaagccctgtcctttcgacggcggcatctacgtgtgcagagccaccaatctgcagggcgaagctagatgcgagtgcagactggaagttcgggtgccccagtaagcggccgccaataaaggatcgtttattttcattggaagcgtgtgttggttttttgatcaggcgcgtccaagcttgcatgctggggagagatctgcggccgcaggaacccctagtgatggagttggccactccctctctgcgcgctcgctcgctcactgaggccgcccgggcaaagcccgggcgtcgggcgacctttggtcgcccggcctcagtgagcgagcgagcgcgcagagagggagtggccaa

SEQ ID NO: 102 - DNA, 4801 bp, synthetic construct
  source 1..4801: mol_type = other DNA
ctgcgcgctcgctcgctcactgaggccgggcgaccaaaggtcgcccgacgcccgggctttgcccgggcggcctcagtgagcgagcgagcgcgcagagagggagtggccaactccatcactaggggttcctgcggccgcacgcgtctcagtccattaggagccagtagcctggaagatgtctttacccccagcatcagttcaagtggagcagcacataactcttgccctctgccttccaagattctggtgctgagacttatggagtgtcttggaggttgccttctgccccccaaccctgctcccagctggccctcccaggcctgggttgctggcctctgctttatcaggattctcaagagggacagctggtttatgttgcatgactgttccctgcatatctgctctggttttaaatagcttatctgagcagctggaggaccacatgggcttatatggcgtggggtacatgttcctgtagccttgtccctggcacctgccaaaatagcagccaacaccccccacccccaccgccatccccctgccccacccgtcccctgtcgcacattcctccctccgcagggctggctcaccaggccccagcccacatgcctgcttaaagccctctccatcctctgcctcacccagtccccgctgagactgagcagacgcctccaggatctgtcggcagggtttagtgaaccgtcagatcctgcagaagttggtcgtgaggcactagtccgccaccatgcctgagcctggaaagaaacctgtgtccgccttcagcaagaagcccagatccgttgaagtggccgctggaagccctgccgtgtttgaggccgaaacagaacgcgctggcgtgaaagttcgatggcagagaggcggcagcgatatcagcgccagcaacaaatatggcctggccaccgagggcaccagacacacactgacagtcagagaagtgggccctgccgatcagggctcttatgccgtgattgccggcagcagcaaagtgaagttcgacctgaaagtgatcgaggccgagaaggccgagcctatgcttgctcctgctccagctcctgctgaagctacaggtgctcctggcgaagctccagcaccagctgctgaactgggagagtctgccccatctcctaagggctctagcagcgccgctctgaatggacctacacctggcgctcccgatgatcccatcggcctgtttgttatgaggccccaggatggcgaagtgacagtcggcggcagcatcacctttagcgctagagttgcaggcgccagcctgctgaaacctcctgtggtcaagtggttcaaaggcaaatgggtcgacctgtcctccaaagtgggccagcatctgcagctccacgacagctacgatagagccagcaaggtgtacctgttcgagctgcacatcacagacgcccagccagcctttaccggcagctacagatgtgaagtgtccaccaaggacaagttcgactgcagcaacttcaacctgaccgtgcacgaggccatgggcacaggcgatctggatctgctgagcgcctttcggagaacatctctggctggcggcggaagaagaatcagcgacagccacgaggataccggcatcctggatttcagcagcctgctcaagaagcgggacagcttcagaacccctcgggacagcaaactggaagctcccgccgaggaagatgtctgggagatcctgagacaggcccctcctagcgagtacgagagaatcgcctttcagtacggcgtgaccgacctgagaggcatgctgaagaggctgaagggcatgcgccgggacgagaagaagtccacagccttccagaagaagctggaacccgcctaccaggtgtccaagggccacaagatcagactgaccgtggaactggccgaccacgacgccgaagtgaagtggctgaaaaacggccaagagattcagatgagcggcagcaagtacatcttcgagagcatcggcgccaagcggaccctgacaatcagccagtgtagcctggccgatgacgccgcctatcagtgtgttgttggcggcgagaagtgcagcaccgagctgttcgtgaaagaacctccagtgctgatcacccggcctctggaagatcagctggtcatggtcggacagcgcgtggaattcgagtgcgaggtttccgaagagggcgcccaagtcaaatggctgaaggatggcgtcgagctgaccagagaggaaaccttcaagtaccggttcaagaaggacggccagcggcaccacctgatcatcaatgaagccatgctggaagatgccggccactacgccttgtgtacatctggtggacaggccctggccgagctgattgtgcaagagaagaaactcgaggtgtaccagtctatcgccgacctgatggtcggagccaaagaccaggccgtgttcaagtgcgaagtgtccgacgagaatgtgcgcggcgtgtggctcaagaacggcaaagaactggtgcccgacagccggatcaaggtgtcccacattggcagagtgcacaagctgaccatcgacgacgtgacccctgctgacgaggccgattacagctttgtgcctgagggcttcgcctgtaacctgagcgccaagctgcactttatggaagtcaagatcgacttcgtgccccggcaagagcctcctaagatccacctggattgccctggcagaatccccgacacaatcgtggtggtggccggaaacaagctgagactggatgtgcccatcagcggcgatcctgctcctacagtgatctggcagaaggccatcacacagggcaacaaggcccctgctagacccgctcctgatgctcctgaagataccggcgatagcgacgagtgggtgttcgacaagaaactgctgtgcgagacagagggaagagtgcgagtggaaaccacaaaggaccgcagcatcttcaccgtggaaggcgccgagaaagaggacgagggcgtctacacagtgaccgtgaagaatcccgtgggcgaagatcaagtgaacctgacagtgaaagtcatcgacgtgcccgacgctcctgccgctccaaagatctctaacgtgggagaagatagctgcaccgtgcagtgggagcctccagcttatgatggcggacagcctatcctgggctacatcctggaacgcaagaagaaaaagtcctaccggtggatgcggctgaacttcgatctgatccaagagctgagccacgaagccagacggatgatcgaaggcgtggtgtacgagatgagagtgtacgccgtgaacgccatcggcatgagcagaccttctccagcctctcagcccttcatgcctatcggccctccaagcgaacctacacacctggccgttgaggacgtgtccgataccaccgtgtctctgaaatggcggcctcctgagagagttggagctggcggactggatggctacagcgtggaatactgtccagagggctgtagcgagtgggttgcagctctgcagggactgaccgagcacacctctatcctggtcaaggacctgcctaccggcgctagactgctgtttagagtgcgggcccacaacatggctggaccaggtgcaccagtgaccaccacagaacccgtgacagtgcaagaaatcctgcagcggccaagactgcagctgcccagacacctgaggcagaccatccagaaaaaagtgggcgagcccgtgaacctgctgatcccatttcaaggcaagcccagacctcaagtgacctggaccaaagagggacagcctctggccggcgaagaggtgtccatcagaaacagccccaccgacaccatcctgttcatcagagccgccagaagggtgcactccggcacctatcaagtgactgtgcggatcgagaacatggaagataaggccacactggtgctgcaggtcgtggacaaacccagtcctcctcaggacctgcgcgtgacagatgcctggggactgaatgtggctctggaatggaagcctccacaggacgtgggcaacacagagctgtggggctataccgtgcagaaagccgacaaaaagaccatggaatggttcaccgtgctggaacactaccggcggacccattgtgtggtgcctgagctgatcatcggcaacggctactacttccgggtgttcagccagaatatggtcggattcagcgatagggccgccaccacaaaagaaccagtgttcatccccagacctggcatcacctacgagcctccaaactacaaggccctggacttcagcgaggcccctagctttacacagcccctggtcaacagaagcgtgatcgccggctacaccgccatgctgtgttgtgccgttagaggcagccccaagcctaagatctcctggtttaagaacggcctggacctcggcgaggacgccagattcagaatgttcagcaagcagggcgtgctgaccctggaaatcagaaagccctgtcctttcgacggcggcatctacgtgtgcagagccaccaatctgcagggcgaagctagatgcgagtgcagactggaagttcgggtgccccagtaagcggccgccaataaaggatcgtttattttcattggaagcgtgtgttggttttttgatcaggcgcgtccaagcttgcatgctggggagagatctgcggccgcaggaacccctagtgatggagttggccactccctctctgcgcgctcgctcgctcactgaggccgggcgaccaaaggtcgcccgacgcccgggctttgcccgggcggcctcagtgagcgagcgagcgcgcag

SEQ ID NO: 103 - DNA, 4831 bp, synthetic construct
  source 1..4831: mol_type = other DNA
ttggccactccctctctgcgcgctcgctcgctcactgaggccgggcgaccaaaggtcgcccgacgcccgggctttgcccgggcggcctcagtgagcgagcgagcgcgcagagagggagtggccaactccatcactaggggttcctgcggccgcacgcgtctcagtccattaggagccagtagcctggaagatgtctttacccccagcatcagttcaagtggagcagcacataactcttgccctctgccttccaagattctggtgctgagacttatggagtgtcttggaggttgccttctgccccccaaccctgctcccagctggccctcccaggcctgggttgctggcctctgctttatcaggattctcaagagggacagctggtttatgttgcatgactgttccctgcatatctgctctggttttaaatagcttatctgagcagctggaggaccacatgggcttatatggcgtggggtacatgttcctgtagccttgtccctggcacctgccaaaatagcagccaacaccccccacccccaccgccatccccctgccccacccgtcccctgtcgcacattcctccctccgcagggctggctcaccaggccccagcccacatgcctgcttaaagccctctccatcctctgcctcacccagtccccgctgagactgagcagacgcctccaggatctgtcggcagggtttagtgaaccgtcagatcctgcagaagttggtcgtgaggcactagtccgccaccatgcctgagcctggaaagaaacctgtgtccgccttcagcaagaagcccagatccgttgaagtggccgctggaagccctgccgtgtttgaggccgaaacagaacgcgctggcgtgaaagttcgatggcagagaggcggcagcgatatcagcgccagcaacaaatatggcctggccaccgagggcaccagacacacactgacagtcagagaagtgggccctgccgatcagggctcttatgccgtgattgccggcagcagcaaagtgaagttcgacctgaaagtgatcgaggccgagaaggccgagcctatgcttgctcctgctccagctcctgctgaagctacaggtgctcctggcgaagctccagcaccagctgctgaactgggagagtctgccccatctcctaagggctctagcagcgccgctctgaatggacctacacctggcgctcccgatgatcccatcggcctgtttgttatgaggccccaggatggcgaagtgacagtcggcggcagcatcacctttagcgctagagttgcaggcgccagcctgctgaaacctcctgtggtcaagtggttcaaaggcaaatgggtcgacctgtcctccaaagtgggccagcatctgcagctccacgacagctacgatagagccagcaaggtgtacctgttcgagctgcacatcacagacgcccagccagcctttaccggcagctacagatgtgaagtgtccaccaaggacaagttcgactgcagcaacttcaacctgaccgtgcacgaggccatgggcacaggcgatctggatctgctgagcgcctttcggagaacatctctggctggcggcggaagaagaatcagcgacagccacgaggataccggcatcctggatttcagcagcctgctcaagaagcgggacagcttcagaacccctcgggacagcaaactggaagctcccgccgaggaagatgtctgggagatcctgagacaggcccctcctagcgagtacgagagaatcgcctttcagtacggcgtgaccgacctgagaggcatgctgaagaggctgaagggcatgcgccgggacgagaagaagtccacagccttccagaagaagctggaacccgcctaccaggtgtccaagggccacaagatcagactgaccgtggaactggccgaccacgacgccgaagtgaagtggctgaaaaacggccaagagattcagatgagcggcagcaagtacatcttcgagagcatcggcgccaagcggaccctgacaatcagccagtgtagcctggccgatgacgccgcctatcagtgtgttgttggcggcgagaagtgcagcaccgagctgttcgtgaaagaacctccagtgctgatcacccggcctctggaagatcagctggtcatggtcggacagcgcgtggaattcgagtgcgaggtttccgaagagggcgcccaagtcaaatggctgaaggatggcgtcgagctgaccagagaggaaaccttcaagtaccggttcaagaaggacggccagcggcaccacctgatcatcaatgaagccatgctggaagatgccggccactacgccttgtgtacatctggtggacaggccctggccgagctgattgtgcaagagaagaaactcgaggtgtaccagtctatcgccgacctgatggtcggagccaaagaccaggccgtgttcaagtgcgaagtgtccgacgagaatgtgcgcggcgtgtggctcaagaacggcaaagaactggtgcccgacagccggatcaaggtgtcccacattggcagagtgcacaagctgaccatcgacgacgtgacccctgctgacgaggccgattacagctttgtgcctgagggcttcgcctgtaacctgagcgccaagctgcactttatggaagtcaagatcgacttcgtgccccggcaagagcctcctaagatccacctggattgccctggcagaatccccgacacaatcgtggtggtggccggaaacaagctgagactggatgtgcccatcagcggcgatcctgctcctacagtgatctggcagaaggccatcacacagggcaacaaggcccctgctagacccgctcctgatgctcctgaagataccggcgatagcgacgagtgggtgttcgacaagaaactgctgtgcgagacagagggaagagtgcgagtggaaaccacaaaggaccgcagcatcttcaccgtggaaggcgccgagaaagaggacgagggcgtctacacagtgaccgtgaagaatcccgtgggcgaagatcaagtgaacctgacagtgaaagtcatcgacgtgcccgacgctcctgccgctccaaagatctctaacgtgggagaagatagctgcaccgtgcagtgggagcctccagcttatgatggcggacagcctatcctgggctacatcctggaacgcaagaagaaaaagtcctaccggtggatgcggctgaacttcgatctgatccaagagctgagccacgaagccagacggatgatcgaaggcgtggtgtacgagatgagagtgtacgccgtgaacgccatcggcatgagcagaccttctccagcctctcagcccttcatgcctatcggccctccaagcgaacctacacacctggccgttgaggacgtgtccgataccaccgtgtctctgaaatggcggcctcctgagagagttggagctggcggactggatggctacagcgtggaatactgtccagagggctgtagcgagtgggttgcagctctgcagggactgaccgagcacacctctatcctggtcaaggacctgcctaccggcgctagactgctgtttagagtgcgggcccacaacatggctggaccaggtgcaccagtgaccaccacagaacccgtgacagtgcaagaaatcctgcagcggccaagactgcagctgcccagacacctgaggcagaccatccagaaaaaagtgggcgagcccgtgaacctgctgatcccatttcaaggcaagcccagacctcaagtgacctggaccaaagagggacagcctctggccggcgaagaggtgtccatcagaaacagccccaccgacaccatcctgttcatcagagccgccagaagggtgcactccggcacctatcaagtgactgtgcggatcgagaacatggaagataaggccacactggtgctgcaggtcgtggacaaacccagtcctcctcaggacctgcgcgtgacagatgcctggggactgaatgtggctctggaatggaagcctccacaggacgtgggcaacacagagctgtggggctataccgtgcagaaagccgacaaaaagaccatggaatggttcaccgtgctggaacactaccggcggacccattgtgtggtgcctgagctgatcatcggcaacggctactacttccgggtgttcagccagaatatggtcggattcagcgatagggccgccaccacaaaagaaccagtgttcatccccagacctggcatcacctacgagcctccaaactacaaggccctggacttcagcgaggcccctagctttacacagcccctggtcaacagaagcgtgatcgccggctacaccgccatgctgtgttgtgccgttagaggcagccccaagcctaagatctcctggtttaagaacggcctggacctcggcgaggacgccagattcagaatgttcagcaagcagggcgtgctgaccctggaaatcagaaagccctgtcctttcgacggcggcatctacgtgtgcagagccaccaatctgcagggcgaagctagatgcgagtgcagactggaagttcgggtgccccagtaagcggccgccaataaaggatcgtttattttcattggaagcgtgtgttggttttttgatcaggcgcgtccaagcttgcatgctggggagagatctgcggccgcaggaacccctagtgatggagttggccactccctctctgcgcgctcgctcgctcactgaggccgggcgaccaaaggtcgcccgacgcccgggctttgcccgggcggcctcagtgagcgagcgagcgcgcagagagggagtggccaa

SEQ ID NO: 104 - DNA, 4801 bp, synthetic construct
  source 1..4801: mol_type = other DNA
ctgcgcgctcgctcgctcactgaggccgggcgaccaaaggtcgcccgacgcccgggctttgcccgggcggcctcagtgagcgagcgagcgcgcagagagggagtggccaactccatcactaggggttcctgcggccgcacgcgtctcagtccattaggagccagtagcctggaagatgtctttacccccagcatcagttcaagtggagcagcacataactcttgccctctgccttccaagattctggtgctgagacttatggagtgtcttggaggttgccttctgccccccaaccctgctcccagctggccctcccaggcctgggttgctggcctctgctttatcaggattctcaagagggacagctggtttatgttgcatgactgttccctgcatatctgctctggttttaaatagcttatctgagcagctggaggaccacatgggcttatatggcgtggggtacatgttcctgtagccttgtccctggcacctgccaaaatagcagccaacaccccccacccccaccgccatccccctgccccacccgtcccctgtcgcacattcctccctccgcagggctggctcaccaggccccagcccacatgcctgcttaaagccctctccatcctctgcctcacccagtccccgctgagactgagcagacgcctccaggatctgtcggcagggtttagtgaaccgtcagatcctgcagaagttggtcgtgaggcactagtccgccaccatgcctgagccggggaagaagccagtctcagcttttagcaagaagccacggtcagtggaagtggccgcaggcagccctgccgtgttcgaggccgagacagagcgggcaggagtgaaggtgcgctggcagcgcggaggcagtgacatcagcgccagcaacaagtacggcctggccacagagggcacacggcatacgctgacagtgcgggaagtgggccctgccgaccagggatcttacgcagtcattgctggctcctccaaggtcaagttcgacctcaaggtcatagaggcagagaaggcagagcccatgctggcccctgcccctgcccctgctgaggccactggagcccctggagaagccccggccccagccgctgagctgggagaaagtgccccaagtcccaaagggtcaagctcagcagctctcaatggtcctacccctggagcccccgatgaccccattggcctcttcgtgatgcggccacaggatggcgaggtgaccgtgggtggcagcatcaccttctcagcccgcgtggccggcgccagcctcctgaagccgcctgtggtcaagtggttcaagggcaaatgggtggacctgagcagcaaggtgggccagcacctgcagctgcacgacagctacgaccgcgccagcaaggtctatctgttcgagctgcacatcaccgatgcccagcctgccttcactggcagctaccgctgtgaggtgtccaccaaggacaaatttgactgctccaacttcaatctcactgtccacgaggccatgggcaccggagacctggacctcctatcagccttccgccgcacgagcctggctggaggtggtcggcggatcagtgatagccatgaggacactgggattctggacttcagctcactgctgaaaaagagagacagtttccggaccccgagggactcgaagctggaggcaccagcagaggaggacgtgtgggagatcctacggcaggcacccccatctgagtacgagcgcatcgccttccagtacggcgtcactgacctgcgcggcatgctaaagaggctcaagggcatgaggcgcgatgagaagaagagcacagcctttcagaagaagctggagccggcctaccaggtgagcaaaggccacaagatccggctgaccgtggaactggctgaccatgacgctgaggtcaaatggctcaagaatggccaggagatccagatgagcggcagcaagtacatctttgagtccatcggtgccaagcgtaccctgaccatcagccagtgctcattggcggacgacgcagcctaccagtgcgtggtgggtggcgagaagtgtagcacggagctctttgtgaaagagccccctgtgctcatcacgcgccccttggaggaccagctggtgatggtggggcagcgggtggagtttgagtgtgaagtatcggaggagggggcgcaagtcaaatggctgaaggacggggtggagctgacccgggaggagaccttcaaataccggttcaagaaggacgggcagagacaccacctgatcatcaacgaggccatgctggaggacgcggggcactatgcactgtgcactagcgggggccaggcgctggctgagctcattgtgcaggaaaagaagctggaggtgtaccagagcatcgcagacctgatggtgggcgcaaaggaccaggcggtgttcaaatgtgaggtctcagatgagaatgttcggggtgtgtggctgaagaatgggaaggagctggtgcccgacagccgcataaaggtgtcccacatcgggcgggtccacaaactgaccattgacgacgtcacacctgccgacgaggctgactacagctttgtgcccgagggcttcgcctgcaacctgtcagccaagctccacttcatggaggtcaagattgacttcgtacccaggcaggaacctcccaagatccacctggactgcccaggccgcataccagacaccattgtggttgtagctggaaataagctacgtctggacgtccctatctctggggaccctgctcccactgtgatctggcagaaggctatcacgcaggggaataaggccccagccaggccagccccagatgccccagaggacacaggtgacagcgatgagtgggtgtttgacaagaagctgctgtgtgagaccgagggccgggtccgcgtggagaccaccaaggaccgcagcatcttcacggtcgagggggcagagaaggaagatgagggcgtctacacggtcacagtgaagaaccctgtgggcgaggaccaggtcaacctcacagtcaaggtcatcgacgtgccagacgcacctgcggcccccaagatcagcaacgtgggagaggactcctgcacagtacagtgggagccgcctgcctacgatggcgggcagcccatcctgggctacatcctggagcgcaagaagaagaagagctaccggtggatgcggctgaacttcgacctgattcaggagctgagtcatgaagcgcggcgcatgatcgagggcgtggtgtacgagatgcgcgtctacgcggtcaacgccatcggcatgtccaggcccagccctgcctcccagcccttcatgcctatcggtccccccagcgaacccacccacctggcagtagaggacgtctctgacaccacggtctccctcaagtggcggcccccagagcgcgtgggagcaggaggcctggatggctacagcgtggagtactgcccagagggctgctcagagtgggtggctgccctgcaggggctgacagagcacacatcgatactggtgaaggacctgcccacgggggcccggctgcttttccgagtgcgggcacacaatatggcagggcctggagcccctgttaccaccacggagccggtgacagtgcaggagatcctgcaacggccacggcttcagctgcccaggcacctgcgccagaccattcagaagaaggtcggggagcctgtgaaccttctcatccctttccagggcaagccccggcctcaggtgacctggaccaaagaggggcagcccctggcaggcgaggaggtgagcatccgcaacagccccacagacaccatcctgttcatccgggccgctcgccgcgtgcattcaggcacttaccaggtgacggtgcgcattgagaacatggaggacaaggccacgctggtgctgcaggttgttgacaagccaagtcctccccaggatctccgggtgactgacgcctggggtcttaatgtggctctggagtggaagccaccccaggatgtcggcaacacggaactctgggggtacacagtgcagaaagccgacaagaagaccatggagtggttcaccgtcttggagcattaccgccgcacccactgcgtggtgccagagctcatcattggcaatggctactacttccgcgtcttcagccagaatatggttggctttagtgacagagcggccaccaccaaggagcccgtctttatccccagaccaggcatcacctatgagccacccaactataaggccctggacttctccgaggccccaagcttcacccagcccctggtgaaccgctcggtcatcgcgggctacactgctatgctctgctgtgctgtccggggtagccccaagcccaagatttcctggttcaagaatggcctggacctgggagaagacgcccgcttccgcatgttcagcaagcagggagtgttgactctggagattagaaagccctgcccctttgacgggggcatctatgtctgcagggccaccaacttacagggcgaggcacggtgtgagtgccgcctggaggtgcgagtgcctcagtgagcggccgccaataaaggatcgtttattttcattggaagcgtgtgttggttttttgatcaggcgcgtccaagcttgcatgctggggagagatctgcggccgcaggaacccctagtgatggagttggccactccctctctgcgcgctcgctcgctcactgaggccgcccgggcaaagcccgggcgtcgggcgacctttggtcgcccggcctcagtgagcgagcgagcgcgcag

SEQ ID NO: 105 - DNA, 4831 bp, synthetic construct
  source 1..4831: mol_type = other DNA
ttggccactccctctctgcgcgctcgctcgctcactgaggccgggcgaccaaaggtcgcccgacgcccgggctttgcccgggcggcctcagtgagcgagcgagcgcgcagagagggagtggccaactccatcactaggggttcctgcggccgcacgcgtctcagtccattaggagccagtagcctggaagatgtctttacccccagcatcagttcaagtggagcagcacataactcttgccctctgccttccaagattctggtgctgagacttatggagtgtcttggaggttgccttctgccccccaaccctgctcccagctggccctcccaggcctgggttgctggcctctgctttatcaggattctcaagagggacagctggtttatgttgcatgactgttccctgcatatctgctctggttttaaatagcttatctgagcagctggaggaccacatgggcttatatggcgtggggtacatgttcctgtagccttgtccctggcacctgccaaaatagcagccaacaccccccacccccaccgccatccccctgccccacccgtcccctgtcgcacattcctccctccgcagggctggctcaccaggccccagcccacatgcctgcttaaagccctctccatcctctgcctcacccagtccccgctgagactgagcagacgcctccaggatctgtcggcagggtttagtgaaccgtcagatcctgcagaagttggtcgtgaggcactagtccgccaccatgcctgagccggggaagaagccagtctcagcttttagcaagaagccacggtcagtggaagtggccgcaggcagccctgccgtgttcgaggccgagacagagcgggcaggagtgaaggtgcgctggcagcgcggaggcagtgacatcagcgccagcaacaagtacggcctggccacagagggcacacggcatacgctgacagtgcgggaagtgggccctgccgaccagggatcttacgcagtcattgctggctcctccaaggtcaagttcgacctcaaggtcatagaggcagagaaggcagagcccatgctggcccctgcccctgcccctgctgaggccactggagcccctggagaagccccggccccagccgctgagctgggagaaagtgccccaagtcccaaagggtcaagctcagcagctctcaatggtcctacccctggagcccccgatgaccccattggcctcttcgtgatgcggccacaggatggcgaggtgaccgtgggtggcagcatcaccttctcagcccgcgtggccggcgccagcctcctgaagccgcctgtggtcaagtggttcaagggcaaatgggtggacctgagcagcaaggtgggccagcacctgcagctgcacgacagctacgaccgcgccagcaaggtctatctgttcgagctgcacatcaccgatgcccagcctgccttcactggcagctaccgctgtgaggtgtccaccaaggacaaatttgactgctccaacttcaatctcactgtccacgaggccatgggcaccggagacctggacctcctatcagccttccgccgcacgagcctggctggaggtggtcggcggatcagtgatagccatgaggacactgggattctggacttcagctcactgctgaaaaagagagacagtttccggaccccgagggactcgaagctggaggcaccagcagaggaggacgtgtgggagatcctacggcaggcacccccatctgagtacgagcgcatcgccttccagtacggcgtcactgacctgcgcggcatgctaaagaggctcaagggcatgaggcgcgatgagaagaagagcacagcctttcagaagaagctggagccggcctaccaggtgagcaaaggccacaagatccggctgaccgtggaactggctgaccatgacgctgaggtcaaatggctcaagaatggccaggagatccagatgagcggcagcaagtacatctttgagtccatcggtgccaagcgtaccctgaccatcagccagtgctcattggcggacgacgcagcctaccagtgcgtggtgggtggcgagaagtgtagcacggagctctttgtgaaagagccccctgtgctcatcacgcgccccttggaggaccagctggtgatggtggggcagcgggtggagtttgagtgtgaagtatcggaggagggggcgcaagtcaaatggctgaaggacggggtggagctgacccgggaggagaccttcaaataccggttcaagaaggacgggcagagacaccacctgatcatcaacgaggccatgctggaggacgcggggcactatgcactgtgcactagcgggggccaggcgctggctgagctcattgtgcaggaaaagaagctggaggtgtaccagagcatcgcagacctgatggtgggcgcaaaggaccaggcggtgttcaaatgtgaggtctcagatgagaatgttcggggtgtgtggctgaagaatgggaaggagctggtgcccgacagccgcataaaggtgtcccacatcgggcgggtccacaaactgaccattgacgacgtcacacctgccgacgaggctgactacagctttgtgcccgagggcttcgcctgcaacctgtcagccaagctccacttcatggaggtcaagattgacttcgtacccaggcaggaacctcccaagatccacctggactgcccaggccgcataccagacaccattgtggttgtagctggaaataagctacgtctggacgtccctatctctggggaccctgctcccactgtgatctggcagaaggctatcacgcaggggaataaggccccagccaggccagccccagatgccccagaggacacaggtgacagcgatgagtgggtgtttgacaagaagctgctgtgtgagaccgagggccgggtccgcgtggagaccaccaaggaccgcagcatcttcacggtcgagggggcagagaaggaagatgagggcgtctacacggtcacagtgaagaaccctgtgggcgaggaccaggtcaacctcacagtcaaggtcatcgacgtgccagacgcacctgcggcccccaagatcagcaacgtgggagaggactcctgcacagtacagtgggagccgcctgcctacgatggcgggcagcccatcctgggctacatcctggagcgcaagaagaagaagagctaccggtggatgcggctgaacttcgacctgattcaggagctgagtcatgaagcgcggcgcatgatcgagggcgtggtgtacgagatgcgcgtctacgcggtcaacgccatcggcatgtccaggcccagccctgcctcccagcccttcatgcctatcggtccccccagcgaacccacccacctggcagtagaggacgtctctgacaccacggtctccctcaagtggcggcccccagagcgcgtgggagcaggaggcctggatggctacagcgtggagtactgcccagagggctgctcagagtgggtggctgccctgcaggggctgacagagcacacatcgatactggtgaaggacctgcccacgggggcccggctgcttttccgagtgcgggcacacaatatggcagggcctggagcccctgttaccaccacggagccggtgacagtgcaggagatcctgcaacggccacggcttcagctgcccaggcacctgcgccagaccattcagaagaaggtcggggagcctgtgaaccttctcatccctttccagggcaagccccggcctcaggtgacctggaccaaagaggggcagcccctggcaggcgaggaggtgagcatccgcaacagccccacagacaccatcctgttcatccgggccgctcgccgcgtgcattcaggcacttaccaggtgacggtgcgcattgagaacatggaggacaaggccacgctggtgctgcaggttgttgacaagccaagtcctccccaggatctccgggtgactgacgcctggggtcttaatgtggctctggagtggaagccaccccaggatgtcggcaacacggaactctgggggtacacagtgcagaaagccgacaagaagaccatggagtggttcaccgtcttggagcattaccgccgcacccactgcgtggtgccagagctcatcattggcaatggctactacttccgcgtcttcagccagaatatggttggctttagtgacagagcggccaccaccaaggagcccgtctttatccccagaccaggcatcacctatgagccacccaactataaggccctggacttctccgaggccccaagcttcacccagcccctggtgaaccgctcggtcatcgcgggctacactgctatgctctgctgtgctgtccggggtagccccaagcccaagatttcctggttcaagaatggcctggacctgggagaagacgcccgcttccgcatgttcagcaagcagggagtgttgactctggagattagaaagccctgcccctttgacgggggcatctatgtctgcagggccaccaacttacagggcgaggcacggtgtgagtgccgcctggaggtgcgagtgcctcagtgagcggccgccaataaaggatcgtttattttcattggaagcgtgtgttggttttttgatcaggcgcgtccaagcttgcatgctggggagagatctgcggccgcaggaacccctagtgatggagttggccactccctctctgcgcgctcgctcgctcactgaggccgcccgggcaaagcccgggcgtcgggcgacctttggtcgcccggcctcagtgagcgagcgagcgcgcagagagggagtggccaa

SEQ ID NO: 106 - DNA, 4801 bp, synthetic construct
  source 1..4801: mol_type = other DNA
ctgcgcgctcgctcgctcactgaggccgcccgggcaaagcccgggcgtcgggcgacctttggtcgcccggcctcagtgagcgagcgagcgcgcagagagggagtggccaactccatcactaggggttcctgcggccgcacgcgtctcagtccattaggagccagtagcctggaagatgtctttacccccagcatcagttcaagtggagcagcacataactcttgccctctgccttccaagattctggtgctgagacttatggagtgtcttggaggttgccttctgccccccaaccctgctcccagctggccctcccaggcctgggttgctggcctctgctttatcaggattctcaagagggacagctggtttatgttgcatgactgttccctgcatatctgctctggttttaaatagcttatctgagcagctggaggaccacatgggcttatatggcgtggggtacatgttcctgtagccttgtccctggcacctgccaaaatagcagccaacaccccccacccccaccgccatccccctgccccacccgtcccctgtcgcacattcctccctccgcagggctggctcaccaggccccagcccacatgcctgcttaaagccctctccatcctctgcctcacccagtccccgctgagactgagcagacgcctccaggatctgtcggcagggtttagtgaaccgtcagatcctgcagaagttggtcgtgaggcactagtccgccaccatgcctgagccggggaagaagccagtctcagcttttagcaagaagccacggtcagtggaagtggccgcaggcagccctgccgtgttcgaggccgagacagagcgggcaggagtgaaggtgcgctggcagcgcggaggcagtgacatcagcgccagcaacaagtacggcctggccacagagggcacacggcatacgctgacagtgcgggaagtgggccctgccgaccagggatcttacgcagtcattgctggctcctccaaggtcaagttcgacctcaaggtcatagaggcagagaaggcagagcccatgctggcccctgcccctgcccctgctgaggccactggagcccctggagaagccccggccccagccgctgagctgggagaaagtgccccaagtcccaaagggtcaagctcagcagctctcaatggtcctacccctggagcccccgatgaccccattggcctcttcgtgatgcggccacaggatggcgaggtgaccgtgggtggcagcatcaccttctcagcccgcgtggccggcgccagcctcctgaagccgcctgtggtcaagtggttcaagggcaaatgggtggacctgagcagcaaggtgggccagcacctgcagctgcacgacagctacgaccgcgccagcaaggtctatctgttcgagctgcacatcaccgatgcccagcctgccttcactggcagctaccgctgtgaggtgtccaccaaggacaaatttgactgctccaacttcaatctcactgtccacgaggccatgggcaccggagacctggacctcctatcagccttccgccgcacgagcctggctggaggtggtcggcggatcagtgatagccatgaggacactgggattctggacttcagctcactgctgaaaaagagagacagtttccggaccccgagggactcgaagctggaggcaccagcagaggaggacgtgtgggagatcctacggcaggcacccccatctgagtacgagcgcatcgccttccagtacggcgtcactgacctgcgcggcatgctaaagaggctcaagggcatgaggcgcgatgagaagaagagcacagcctttcagaagaagctggagccggcctaccaggtgagcaaaggccacaagatccggctgaccgtggaactggctgaccatgacgctgaggtcaaatggctcaagaatggccaggagatccagatgagcggcagcaagtacatctttgagtccatcggtgccaagcgtaccctgaccatcagccagtgctcattggcggacgacgcagcctaccagtgcgtggtgggtggcgagaagtgtagcacggagctctttgtgaaagagccccctgtgctcatcacgcgccccttggaggaccagctggtgatggtggggcagcgggtggagtttgagtgtgaagtatcggaggagggggcgcaagtcaaatggctgaaggacggggtggagctgacccgggaggagaccttcaaataccggttcaagaaggacgggcagagacaccacctgatcatcaacgaggccatgctggaggacgcggggcactatgcactgtgcactagcgggggccaggcgctggctgagctcattgtgcaggaaaagaagctggaggtgtaccagagcatcgcagacctgatggtgggcgcaaaggaccaggcggtgttcaaatgtgaggtctcagatgagaatgttcggggtgtgtggctgaagaatgggaaggagctggtgcccgacagccgcataaaggtgtcccacatcgggcgggtccacaaactgaccattgacgacgtcacacctgccgacgaggctgactacagctttgtgcccgagggcttcgcctgcaacctgtcagccaagctccacttcatggaggtcaagattgacttcgtacccaggcaggaacctcccaagatccacctggactgcccaggccgcataccagacaccattgtggttgtagctggaaataagctacgtctggacgtccctatctctggggaccctgctcccactgtgatctggcagaaggctatcacgcaggggaataaggccccagccaggccagccccagatgccccagaggacacaggtgacagcgatgagtgggtgtttgacaagaagctgctgtgtgagaccgagggccgggtccgcgtggagaccaccaaggaccgcagcatcttcacggtcgagggggcagagaaggaagatgagggcgtctacacggtcacagtgaagaaccctgtgggcgaggaccaggtcaacctcacagtcaaggtcatcgacgtgccagacgcacctgcggcccccaagatcagcaacgtgggagaggactcctgcacagtacagtgggagccgcctgcctacgatggcgggcagcccatcctgggctacatcctggagcgcaagaagaagaagagctaccggtggatgcggctgaacttcgacctgattcaggagctgagtcatgaagcgcggcgcatgatcgagggcgtggtgtacgagatgcgcgtctacgcggtcaacgccatcggcatgtccaggcccagccctgcctcccagcccttcatgcctatcggtccccccagcgaacccacccacctggcagtagaggacgtctctgacaccacggtctccctcaagtggcggcccccagagcgcgtgggagcaggaggcctggatggctacagcgtggagtactgcccagagggctgctcagagtgggtggctgccctgcaggggctgacagagcacacatcgatactggtgaaggacctgcccacgggggcccggctgcttttccgagtgcgggcacacaatatggcagggcctggagcccctgttaccaccacggagccggtgacagtgcaggagatcctgcaacggccacggcttcagctgcccaggcacctgcgccagaccattcagaagaaggtcggggagcctgtgaaccttctcatccctttccagggcaagccccggcctcaggtgacctggaccaaagaggggcagcccctggcaggcgaggaggtgagcatccgcaacagccccacagacaccatcctgttcatccgggccgctcgccgcgtgcattcaggcacttaccaggtgacggtgcgcattgagaacatggaggacaaggccacgctggtgctgcaggttgttgacaagccaagtcctccccaggatctccgggtgactgacgcctggggtcttaatgtggctctggagtggaagccaccccaggatgtcggcaacacggaactctgggggtacacagtgcagaaagccgacaagaagaccatggagtggttcaccgtcttggagcattaccgccgcacccactgcgtggtgccagagctcatcattggcaatggctactacttccgcgtcttcagccagaatatggttggctttagtgacagagcggccaccaccaaggagcccgtctttatccccagaccaggcatcacctatgagccacccaactataaggccctggacttctccgaggccccaagcttcacccagcccctggtgaaccgctcggtcatcgcgggctacactgctatgctctgctgtgctgtccggggtagccccaagcccaagatttcctggttcaagaatggcctggacctgggagaagacgcccgcttccgcatgttcagcaagcagggagtgttgactctggagattagaaagccctgcccctttgacgggggcatctatgtctgcagggccaccaacttacagggcgaggcacggtgtgagtgccgcctggaggtgcgagtgcctcagtgagcggccgccaataaaggatcgtttattttcattggaagcgtgtgttggttttttgatcaggcgcgtccaagcttgcatgctggggagagatctgcggccgcaggaacccctagtgatggagttggccactccctctctgcgcgctcgctcgctcactgaggccgcccgggcaaagcccgggcgtcgggcgacctttggtcgcccggcctcagtgagcgagcgagcgcgcag

SEQ ID NO: 107 - DNA, 4831 bp, synthetic construct
  source 1..4831: mol_type = other DNA
ttggccactccctctctgcgcgctcgctcgctcactgaggccgcccgggcaaagcccgggcgtcgggcgacctttggtcgcccggcctcagtgagcgagcgagcgcgcagagagggagtggccaactccatcactaggggttcctgcggccgcacgcgtctcagtccattaggagccagtagcctggaagatgtctttacccccagcatcagttcaagtggagcagcacataactcttgccctctgccttccaagattctggtgctgagacttatggagtgtcttggaggttgccttctgccccccaaccctgctcccagctggccctcccaggcctgggttgctggcctctgctttatcaggattctcaagagggacagctggtttatgttgcatgactgttccctgcatatctgctctggttttaaatagcttatctgagcagctggaggaccacatgggcttatatggcgtggggtacatgttcctgtagccttgtccctggcacctgccaaaatagcagccaacaccccccacccccaccgccatccccctgccccacccgtcccctgtcgcacattcctccctccgcagggctggctcaccaggccccagcccacatgcctgcttaaagccctctccatcctctgcctcacccagtccccgctgagactgagcagacgcctccaggatctgtcggcagggtttagtgaaccgtcagatcctgcagaagttggtcgtgaggcactagtccgccaccatgcctgagccggggaagaagccagtctcagcttttagcaagaagccacggtcagtggaagtggccgcaggcagccctgccgtgttcgaggccgagacagagcgggcaggagtgaaggtgcgctggcagcgcggaggcagtgacatcagcgccagcaacaagtacggcctggccacagagggcacacggcatacgctgacagtgcgggaagtgggccctgccgaccagggatcttacgcagtcattgctggctcctccaaggtcaagttcgacctcaaggtcatagaggcagagaaggcagagcccatgctggcccctgcccctgcccctgctgaggccactggagcccctggagaagccccggccccagccgctgagctgggagaaagtgccccaagtcccaaagggtcaagctcagcagctctcaatggtcctacccctggagcccccgatgaccccattggcctcttcgtgatgcggccacaggatggcgaggtgaccgtgggtggcagcatcaccttctcagcccgcgtggccggcgccagcctcctgaagccgcctgtggtcaagtggttcaagggcaaatgggtggacctgagcagcaaggtgggccagcacctgcagctgcacgacagctacgaccgcgccagcaaggtctatctgttcgagctgcacatcaccgatgcccagcctgccttcactggcagctaccgctgtgaggtgtccaccaaggacaaatttgactgctccaacttcaatctcactgtccacgaggccatgggcaccggagacctggacctcctatcagccttccgccgcacgagcctggctggaggtggtcggcggatcagtgatagccatgaggacactgggattctggacttcagctcactgctgaaaaagagagacagtttccggaccccgagggactcgaagctggaggcaccagcagaggaggacgtgtgggagatcctacggcaggcacccccatctgagtacgagcgcatcgccttccagtacggcgtcactgacctgcgcggcatgctaaagaggctcaagggcatgaggcgcgatgagaagaagagcacagcctttcagaagaagctggagccggcctaccaggtgagcaaaggccacaagatccggctgaccgtggaactggctgaccatgacgctgaggtcaaatggctcaagaatggccaggagatccagatgagcggcagcaagtacatctttgagtccatcggtgccaagcgtaccctgaccatcagccagtgctcattggcggacgacgcagcctaccagtgcgtggtgggtggcgagaagtgtagcacggagctctttgtgaaagagccccctgtgctcatcacgcgccccttggaggaccagctggtgatggtggggcagcgggtggagtttgagtgtgaagtatcggaggagggggcgcaagtcaaatggctgaaggacggggtggagctgacccgggaggagaccttcaaataccggttcaagaaggacgggcagagacaccacctgatcatcaacgaggccatgctggaggacgcggggcactatgcactgtgcactagcgggggccaggcgctggctgagctcattgtgcaggaaaagaagctggaggtgtaccagagcatcgcagacctgatggtgggcgcaaaggaccaggcggtgttcaaatgtgaggtctcagatgagaatgttcggggtgtgtggctgaagaatgggaaggagctggtgcccgacagccgcataaaggtgtcccacatcgggcgggtccacaaactgaccattgacgacgtcacacctgccgacgaggctgactacagctttgtgcccgagggcttcgcctgcaacctgtcagccaagctccacttcatggaggtcaagattgacttcgtacccaggcaggaacctcccaagatccacctggactgcccaggccgcataccagacaccattgtggttgtagctggaaataagctacgtctggacgtccctatctctggggaccctgctcccactgtgatctggcagaaggctatcacgcaggggaataaggccccagccaggccagccccagatgccccagaggacacaggtgacagcgatgagtgggtgtttgacaagaagctgctgtgtgagaccgagggccgggtccgcgtggagaccaccaaggaccgcagcatcttcacggtcgagggggcagagaaggaagatgagggcgtctacacggtcacagtgaagaaccctgtgggcgaggaccaggtcaacctcacagtcaaggtcatcgacgtgccagacgcacctgcggcccccaagatcagcaacgtgggagaggactcctgcacagtacagtgggagccgcctgcctacgatggcgggcagcccatcctgggctacatcctggagcgcaagaagaagaagagctaccggtggatgcggctgaacttcgacctgattcaggagctgagtcatgaagcgcggcgcatgatcgagggcgtggtgtacgagatgcgcgtctacgcggtcaacgccatcggcatgtccaggcccagccctgcctcccagcccttcatgcctatcggtccccccagcgaacccacccacctggcagtagaggacgtctctgacaccacggtctccctcaagtggcggcccccagagcgcgtgggagcaggaggcctggatggctacagcgtggagtactgcccagagggctgctcagagtgggtggctgccctgcaggggctgacagagcacacatcgatactggtgaaggacctgcccacgggggcccggctgcttttccgagtgcgggcacacaatatggcagggcctggagcccctgttaccaccacggagccggtgacagtgcaggagatcctgcaacggccacggcttcagctgcccaggcacctgcgccagaccattcagaagaaggtcggggagcctgtgaaccttctcatccctttccagggcaagccccggcctcaggtgacctggaccaaagaggggcagcccctggcaggcgaggaggtgagcatccgcaacagccccacagacaccatcctgttcatccgggccgctcgccgcgtgcattcaggcacttaccaggtgacggtgcgcattgagaacatggaggacaaggccacgctggtgctgcaggttgttgacaagccaagtcctccccaggatctccgggtgactgacgcctggggtcttaatgtggctctggagtggaagccaccccaggatgtcggcaacacggaactctgggggtacacagtgcagaaagccgacaagaagaccatggagtggttcaccgtcttggagcattaccgccgcacccactgcgtggtgccagagctcatcattggcaatggctactacttccgcgtcttcagccagaatatggttggctttagtgacagagcggccaccaccaaggagcccgtctttatccccagaccaggcatcacctatgagccacccaactataaggccctggacttctccgaggccccaagcttcacccagcccctggtgaaccgctcggtcatcgcgggctacactgctatgctctgctgtgctgtccggggtagccccaagcccaagatttcctggttcaagaatggcctggacctgggagaagacgcccgcttccgcatgttcagcaagcagggagtgttgactctggagattagaaagccctgcccctttgacgggggcatctatgtctgcagggccaccaacttacagggcgaggcacggtgtgagtgccgcctggaggtgcgagtgcctcagtgagcggccgccaataaaggatcgtttattttcattggaagcgtgtgttggttttttgatcaggcgcgtccaagcttgcatgctggggagagatctgcggccgcaggaacccctagtgatggagttggccactccctctctgcgcgctcgctcgctcactgaggccgcccgggcaaagcccgggcgtcgggcgacctttggtcgcccggcctcagtgagcgagcgagcgcgcagagagggagtggccaa

SEQ ID NO: 108 - DNA, 4801 bp, synthetic construct
  source 1..4801: mol_type = other DNA
ctgcgcgctcgctcgctcactgaggccgggcgaccaaaggtcgcccgacgcccgggctttgcccgggcggcctcagtgagcgagcgagcgcgcagagagggagtggccaactccatcactaggggttcctgcggccgcacgcgtctcagtccattaggagccagtagcctggaagatgtctttacccccagcatcagttcaagtggagcagcacataactcttgccctctgccttccaagattctggtgctgagacttatggagtgtcttggaggttgccttctgccccccaaccctgctcccagctggccctcccaggcctgggttgctggcctctgctttatcaggattctcaagagggacagctggtttatgttgcatgactgttccctgcatatctgctctggttttaaatagcttatctgagcagctggaggaccacatgggcttatatggcgtggggtacatgttcctgtagccttgtccctggcacctgccaaaatagcagccaacaccccccacccccaccgccatccccctgccccacccgtcccctgtcgcacattcctccctccgcagggctggctcaccaggccccagcccacatgcctgcttaaagccctctccatcctctgcctcacccagtccccgctgagactgagcagacgcctccaggatctgtcggcagggtttagtgaaccgtcagatcctgcagaagttggtcgtgaggcactagtccgccaccatgcctgagccggggaagaagccagtctcagcttttagcaagaagccacggtcagtggaagtggccgcaggcagccctgccgtgttcgaggccgagacagagcgggcaggagtgaaggtgcgctggcagcgcggaggcagtgacatcagcgccagcaacaagtacggcctggccacagagggcacacggcatacgctgacagtgcgggaagtgggccctgccgaccagggatcttacgcagtcattgctggctcctccaaggtcaagttcgacctcaaggtcatagaggcagagaaggcagagcccatgctggcccctgcccctgcccctgctgaggccactggagcccctggagaagccccggccccagccgctgagctgggagaaagtgccccaagtcccaaagggtcaagctcagcagctctcaatggtcctacccctggagcccccgatgaccccattggcctcttcgtgatgcggccacaggatggcgaggtgaccgtgggtggcagcatcaccttctcagcccgcgtggccggcgccagcctcctgaagccgcctgtggtcaagtggttcaagggcaaatgggtggacctgagcagcaaggtgggccagcacctgcagctgcacgacagctacgaccgcgccagcaaggtctatctgttcgagctgcacatcaccgatgcccagcctgccttcactggcagctaccgctgtgaggtgtccaccaaggacaaatttgactgctccaacttcaatctcactgtccacgaggccatgggcaccggagacctggacctcctatcagccttccgccgcacgagcctggctggaggtggtcggcggatcagtgatagccatgaggacactgggattctggacttcagctcactgctgaaaaagagagacagtttccggaccccgagggactcgaagctggaggcaccagcagaggaggacgtgtgggagatcctacggcaggcacccccatctgagtacgagcgcatcgccttccagtacggcgtcactgacctgcgcggcatgctaaagaggctcaagggcatgaggcgcgatgagaagaagagcacagcctttcagaagaagctggagccggcctaccaggtgagcaaaggccacaagatccggctgaccgtggaactggctgaccatgacgctgaggtcaaatggctcaagaatggccaggagatccagatgagcggcagcaagtacatctttgagtccatcggtgccaagcgtaccctgaccatcagccagtgctcattggcggacgacgcagcctaccagtgcgtggtgggtggcgagaagtgtagcacggagctctttgtgaaagagccccctgtgctcatcacgcgccccttggaggaccagctggtgatggtggggcagcgggtggagtttgagtgtgaagtatcggaggagggggcgcaagtcaaatggctgaaggacggggtggagctgacccgggaggagaccttcaaataccggttcaagaaggacgggcagagacaccacctgatcatcaacgaggccatgctggaggacgcggggcactatgcactgtgcactagcgggggccaggcgctggctgagctcattgtgcaggaaaagaagctggaggtgtaccagagcatcgcagacctgatggtgggcgcaaaggaccaggcggtgttcaaatgtgaggtctcagatgagaatgttcggggtgtgtggctgaagaatgggaaggagctggtgcccgacagccgcataaaggtgtcccacatcgggcgggtccacaaactgaccattgacgacgtcacacctgccgacgaggctgactacagctttgtgcccgagggcttcgcctgcaacctgtcagccaagctccacttcatggaggtcaagattgacttcgtacccaggcaggaacctcccaagatccacctggactgcccaggccgcataccagacaccattgtggttgtagctggaaataagctacgtctggacgtccctatctctggggaccctgctcccactgtgatctggcagaaggctatcacgcaggggaataaggccccagccaggccagccccagatgccccagaggacacaggtgacagcgatgagtgggtgtttgacaagaagctgctgtgtgagaccgagggccgggtccgcgtggagaccaccaaggaccgcagcatcttcacggtcgagggggcagagaaggaagatgagggcgtctacacggtcacagtgaagaaccctgtgggcgaggaccaggtcaacctcacagtcaaggtcatcgacgtgccagacgcacctgcggcccccaagatcagcaacgtgggagaggactcctgcacagtacagtgggagccgcctgcctacgatggcgggcagcccatcctgggctacatcctggagcgcaagaagaagaagagctaccggtggatgcggctgaacttcgacctgattcaggagctgagtcatgaagcgcggcgcatgatcgagggcgtggtgtacgagatgcgcgtctacgcggtcaacgccatcggcatgtccaggcccagccctgcctcccagcccttcatgcctatcggtccccccagcgaacccacccacctggcagtagaggacgtctctgacaccacggtctccctcaagtggcggcccccagagcgcgtgggagcaggaggcctggatggctacagcgtggagtactgcccagagggctgctcagagtgggtggctgccctgcaggggctgacagagcacacatcgatactggtgaaggacctgcccacgggggcccggctgcttttccgagtgcgggcacacaatatggcagggcctggagcccctgttaccaccacggagccggtgacagtgcaggagatcctgcaacggccacggcttcagctgcccaggcacctgcgccagaccattcagaagaaggtcggggagcctgtgaaccttctcatccctttccagggcaagccccggcctcaggtgacctggaccaaagaggggcagcccctggcaggcgaggaggtgagcatccgcaacagccccacagacaccatcctgttcatccgggccgctcgccgcgtgcattcaggcacttaccaggtgacggtgcgcattgagaacatggaggacaaggccacgctggtgctgcaggttgttgacaagccaagtcctccccaggatctccgggtgactgacgcctggggtcttaatgtggctctggagtggaagccaccccaggatgtcggcaacacggaactctgggggtacacagtgcagaaagccgacaagaagaccatggagtggttcaccgtcttggagcattaccgccgcacccactgcgtggtgccagagctcatcattggcaatggctactacttccgcgtcttcagccagaatatggttggctttagtgacagagcggccaccaccaaggagcccgtctttatccccagaccaggcatcacctatgagccacccaactataaggccctggacttctccgaggccccaagcttcacccagcccctggtgaaccgctcggtcatcgcgggctacactgctatgctctgctgtgctgtccggggtagccccaagcccaagatttcctggttcaagaatggcctggacctgggagaagacgcccgcttccgcatgttcagcaagcagggagtgttgactctggagattagaaagccctgcccctttgacgggggcatctatgtctgcagggccaccaacttacagggcgaggcacggtgtgagtgccgcctggaggtgcgagtgcctcagtgagcggccgccaataaaggatcgtttattttcattggaagcgtgtgttggttttttgatcaggcgcgtccaagcttgcatgctggggagagatctgcggccgcaggaacccctagtgatggagttggccactccctctctgcgcgctcgctcgctcactgaggccgggcgaccaaaggtcgcccgacgcccgggctttgcccgggcggcctcagtgagcgagcgagcgcgcag

SEQ ID NO: 109 - DNA, 4831 bp, synthetic construct
  source 1..4831: mol_type = other DNA
ttggccactccctctctgcgcgctcgctcgctcactgaggccgggcgaccaaaggtcgcccgacgcccgggctttgcccgggcggcctcagtgagcgagcgagcgcgcagagagggagtggccaactccatcactaggggttcctgcggccgcacgcgtctcagtccattaggagccagtagcctggaagatgtctttacccccagcatcagttcaagtggagcagcacataactcttgccctctgccttccaagattctggtgctgagacttatggagtgtcttggaggttgccttctgccccccaaccctgctcccagctggccctcccaggcctgggttgctggcctctgctttatcaggattctcaagagggacagctggtttatgttgcatgactgttccctgcatatctgctctggttttaaatagcttatctgagcagctggaggaccacatgggcttatatggcgtggggtacatgttcctgtagccttgtccctggcacctgccaaaatagcagccaacaccccccacccccaccgccatccccctgccccacccgtcccctgtcgcacattcctccctccgcagggctggctcaccaggccccagcccacatgcctgcttaaagccctctccatcctctgcctcacccagtccccgctgagactgagcagacgcctccaggatctgtcggcagggtttagtgaaccgtcagatcctgcagaagttggtcgtgaggcactagtccgccaccatgcctgagccggggaagaagccagtctcagcttttagcaagaagccacggtcagtggaagtggccgcaggcagccctgccgtgttcgaggccgagacagagcgggcaggagtgaaggtgcgctggcagcgcggaggcagtgacatcagcgccagcaacaagtacggcctggccacagagggcacacggcatacgctgacagtgcgggaagtgggccctgccgaccagggatcttacgcagtcattgctggctcctccaaggtcaagttcgacctcaaggtcatagaggcagagaaggcagagcccatgctggcccctgcccctgcccctgctgaggccactggagcccctggagaagccccggccccagccgctgagctgggagaaagtgccccaagtcccaaagggtcaagctcagcagctctcaatggtcctacccctggagcccccgatgaccccattggcctcttcgtgatgcggccacaggatggcgaggtgaccgtgggtggcagcatcaccttctcagcccgcgtggccggcgccagcctcctgaagccgcctgtggtcaagtggttcaagggcaaatgggtggacctgagcagcaaggtgggccagcacctgcagctgcacgacagctacgaccgcgccagcaaggtctatctgttcgagctgcacatcaccgatgcccagcctgccttcactggcagctaccgctgtgaggtgtccaccaaggacaaatttgactgctccaacttcaatctcactgtccacgaggccatgggcaccggagacctggacctcctatcagccttccgccgcacgagcctggctggaggtggtcggcggatcagtgatagccatgaggacactgggattctggacttcagctcactgctgaaaaagagagacagtttccggaccccgagggactcgaagctggaggcaccagcagaggaggacgtgtgggagatcctacggcaggcacccccatctgagtacgagcgcatcgccttccagtacggcgtcactgacctgcgcggcatgctaaagaggctcaagggcatgaggcgcgatgagaagaagagcacagcctttcagaagaagctggagccggcctaccaggtgagcaaaggccacaagatccggctgaccgtggaactggctgaccatgacgctgaggtcaaatggctcaagaatggccaggagatccagatgagcggcagcaagtacatctttgagtccatcggtgccaagcgtaccctgaccatcagccagtgctcattggcggacgacgcagcctaccagtgcgtggtgggtggcgagaagtgtagcacggagctctttgtgaaagagccccctgtgctcatcacgcgccccttggaggaccagctggtgatggtggggcagcgggtggagtttgagtgtgaagtatcggaggagggggcgcaagtcaaatggctgaaggacggggtggagctgacccgggaggagaccttcaaataccggttcaagaaggacgggcagagacaccacctgatcatcaacgaggccatgctggaggacgcggggcactatgcactgtgcactagcgggggccaggcgctggctgagctcattgtgcaggaaaagaagctggaggtgtaccagagcatcgcagacctgatggtgggcgcaaaggaccaggcggtgttcaaatgtgaggtctcagatgagaatgttcggggtgtgtggctgaagaatgggaaggagctggtgcccgacagccgcataaaggtgtcccacatcgggcgggtccacaaactgaccattgacgacgtcacacctgccgacgaggctgactacagctttgtgcccgagggcttcgcctgcaacctgtcagccaagctccacttcatggaggtcaagattgacttcgtacccaggcaggaacctcccaagatccacctggactgcccaggccgcataccagacaccattgtggttgtagctggaaataagctacgtctggacgtccctatctctggggaccctgctcccactgtgatctggcagaaggctatcacgcaggggaataaggccccagccaggccagccccagatgccccagaggacacaggtgacagcgatgagtgggtgtttgacaagaagctgctgtgtgagaccgagggccgggtccgcgtggagaccaccaaggaccgcagcatcttcacggtcgagggggcagagaaggaagatgagggcgtctacacggtcacagtgaagaaccctgtgggcgaggaccaggtcaacctcacagtcaaggtcatcgacgtgccagacgcacctgcggcccccaagatcagcaacgtgggagaggactcctgcacagtacagtgggagccgcctgcctacgatggcgggcagcccatcctgggctacatcctggagcgcaagaagaagaagagctaccggtggatgcggctgaacttcgacctgattcaggagctgagtcatgaagcgcggcgcatgatcgagggcgtggtgtacgagatgcgcgtctacgcggtcaacgccatcggcatgtccaggcccagccctgcctcccagcccttcatgcctatcggtccccccagcgaacccacccacctggcagtagaggacgtctctgacaccacggtctccctcaagtggcggcccccagagcgcgtgggagcaggaggcctggatggctacagcgtggagtactgcccagagggctgctcagagtgggtggctgccctgcaggggctgacagagcacacatcgatactggtgaaggacctgcccacgggggcccggctgcttttccgagtgcgggcacacaatatggcagggcctggagcccctgttaccaccacggagccggtgacagtgcaggagatcctgcaacggccacggcttcagctgcccaggcacctgcgccagaccattcagaagaaggtcggggagcctgtgaaccttctcatccctttccagggcaagccccggcctcaggtgacctggaccaaagaggggcagcccctggcaggcgaggaggtgagcatccgcaacagccccacagacaccatcctgttcatccgggccgctcgccgcgtgcattcaggcacttaccaggtgacggtgcgcattgagaacatggaggacaaggccacgctggtgctgcaggttgttgacaagccaagtcctccccaggatctccgggtgactgacgcctggggtcttaatgtggctctggagtggaagccaccccaggatgtcggcaacacggaactctgggggtacacagtgcagaaagccgacaagaagaccatggagtggttcaccgtcttggagcattaccgccgcacccactgcgtggtgccagagctcatcattggcaatggctactacttccgcgtcttcagccagaatatggttggctttagtgacagagcggccaccaccaaggagcccgtctttatccccagaccaggcatcacctatgagccacccaactataaggccctggacttctccgaggccccaagcttcacccagcccctggtgaaccgctcggtcatcgcgggctacactgctatgctctgctgtgctgtccggggtagccccaagcccaagatttcctggttcaagaatggcctggacctgggagaagacgcccgcttccgcatgttcagcaagcagggagtgttgactctggagattagaaagccctgcccctttgacgggggcatctatgtctgcagggccaccaacttacagggcgaggcacggtgtgagtgccgcctggaggtgcgagtgcctcagtgagcggccgccaataaaggatcgtttattttcattggaagcgtgtgttggttttttgatcaggcgcgtccaagcttgcatgctggggagagatctgcggccgcaggaacccctagtgatggagttggccactccctctctgcgcgctcgctcgctcactgaggccgggcgaccaaaggtcgcccgacgcccgggctttgcccgggcggcctcagtgagcgagcgagcgcgcagagagggagtggccaa

SEQ ID NO: 110 - DNA, 4950 bp, synthetic construct
  source 1..4950: mol_type = other DNA
ctgcgcgctcgctcgctcactgaggccgggcgaccaaaggtcgcccgacgcccgggctttgcccgggcggcctcagtgagcgagcgagcgcgcagagagggagtggccaactccatcactaggggttcctgcggccgcacgcgtctcagtccattaggagccagtagcctggaagatgtctttacccccagcatcagttcaagtggagcagcacataactcttgccctctgccttccaagattctggtgctgagacttatggagtgtcttggaggttgccttctgccccccaaccctgctcccagctggccctcccaggcctgggttgctggcctctgctttatcaggattctcaagagggacagctggtttatgttgcatgactgttccctgcatatctgctctggttttaaatagcttatctgagcagctggaggaccacatgggcttatatggcgtggggtacatgttcctgtagccttgtccctggcacctgccaaaatagcagccaacaccccccacccccaccgccatccccctgccccacccgtcccctgtcgcacattcctccctccgcagggctggctcaccaggccccagcccacatgcctgcttaaagccctctccatcctctgcctcacccagtccccgctgagactgagcagacgcctccaggatctgtcggcagggtttagtgaaccgtcagatcctgcagaagttggtcgtgaggcactagtgggcaggtaagtatcaaggttacaagacaggtttaaggagaccaatagaaactgggcttgtcgagacagagaagactcttgcgtttctgataggcacctattggtcttactgacatccactttgcctttctctccacaggtgtactagtccgccaccatgcctgagccggggaagaagccagtctcagcttttagcaagaagccacggtcagtggaagtggccgcaggcagccctgccgtgttcgaggccgagacagagcgggcaggagtgaaggtgcgctggcagcgcggaggcagtgacatcagcgccagcaacaagtacggcctggccacagagggcacacggcatacgctgacagtgcgggaagtgggccctgccgaccagggatcttacgcagtcattgctggctcctccaaggtcaagttcgacctcaaggtcatagaggcagagaaggcagagcccatgctggcccctgcccctgcccctgctgaggccactggagcccctggagaagccccggccccagccgctgagctgggagaaagtgccccaagtcccaaagggtcaagctcagcagctctcaatggtcctacccctggagcccccgatgaccccattggcctcttcgtgatgcggccacaggatggcgaggtgaccgtgggtggcagcatcaccttctcagcccgcgtggccggcgccagcctcctgaagccgcctgtggtcaagtggttcaagggcaaatgggtggacctgagcagcaaggtgggccagcacctgcagctgcacgacagctacgaccgcgccagcaaggtctatctgttcgagctgcacatcaccgatgcccagcctgccttcactggcagctaccgctgtgaggtgtccaccaaggacaaatttgactgctccaacttcaatctcactgtccacgaggccatgggcaccggagacctggacctcctatcagccttccgccgcacgagcctggctggaggtggtcggcggatcagtgatagccatgaggacactgggattctggacttcagctcactgctgaaaaagagagacagtttccggaccccgagggactcgaagctggaggcaccagcagaggaggacgtgtgggagatcctacggcaggcacccccatctgagtacgagcgcatcgccttccagtacggcgtcactgacctgcgcggcatgctaaagaggctcaagggcatgaggcgcgatgagaagaagagcacagcctttcagaagaagctggagccggcctaccaggtgagcaaaggccacaagatccggctgaccgtggaactggctgaccatgacgctgaggtcaaatggctcaagaatggccaggagatccagatgagcggcagcaagtacatctttgagtccatcggtgccaagcgtaccctgaccatcagccagtgctcattggcggacgacgcagcctaccagtgcgtggtgggtggcgagaagtgtagcacggagctctttgtgaaagagccccctgtgctcatcacgcgccccttggaggaccagctggtgatggtggggcagcgggtggagtttgagtgtgaagtatcggaggagggggcgcaagtcaaatggctgaaggacggggtggagctgacccgggaggagaccttcaaataccggttcaagaaggacgggcagagacaccacctgatcatcaacgaggccatgctggaggacgcggggcactatgcactgtgcactagcgggggccaggcgctggctgagctcattgtgcaggaaaagaagctggaggtgtaccagagcatcgcagacctgatggtgggcgcaaaggaccaggcggtgttcaaatgtgaggtctcagatgagaatgttcggggtgtgtggctgaagaatgggaaggagctggtgcccgacagccgcataaaggtgtcccacatcgggcgggtccacaaactgaccattgacgacgtcacacctgccgacgaggctgactacagctttgtgcccgagggcttcgcctgcaacctgtcagccaagctccacttcatggaggtcaagattgacttcgtacccaggcaggaacctcccaagatccacctggactgcccaggccgcataccagacaccattgtggttgtagctggaaataagctacgtctggacgtccctatctctggggaccctgctcccactgtgatctggcagaaggctatcacgcaggggaataaggccccagccaggccagccccagatgccccagaggacacaggtgacagcgatgagtgggtgtttgacaagaagctgctgtgtgagaccgagggccgggtccgcgtggagaccaccaaggaccgcagcatcttcacggtcgagggggcagagaaggaagatgagggcgtctacacggtcacagtgaagaaccctgtgggcgaggaccaggtcaacctcacagtcaaggtcatcgacgtgccagacgcacctgcggcccccaagatcagcaacgtgggagaggactcctgcacagtacagtgggagccgcctgcctacgatggcgggcagcccatcctgggctacatcctggagcgcaagaagaagaagagctaccggtggatgcggctgaacttcgacctgattcaggagctgagtcatgaagcgcggcgcatgatcgagggcgtggtgtacgagatgcgcgtctacgcggtcaacgccatcggcatgtccaggcccagccctgcctcccagcccttcatgcctatcggtccccccagcgaacccacccacctggcagtagaggacgtctctgacaccacggtctccctcaagtggcggcccccagagcgcgtgggagcaggaggcctggatggctacagcgtggagtactgcccagagggctgctcagagtgggtggctgccctgcaggggctgacagagcacacatcgatactggtgaaggacctgcccacgggggcccggctgcttttccgagtgcgggcacacaatatggcagggcctggagcccctgttaccaccacggagccggtgacagtgcaggagatcctgcaacggccacggcttcagctgcccaggcacctgcgccagaccattcagaagaaggtcggggagcctgtgaaccttctcatccctttccagggcaagccccggcctcaggtgacctggaccaaagaggggcagcccctggcaggcgaggaggtgagcatccgcaacagccccacagacaccatcctgttcatccgggccgctcgccgcgtgcattcaggcacttaccaggtgacggtgcgcattgagaacatggaggacaaggccacgctggtgctgcaggttgttgacaagccaagtcctccccaggatctccgggtgactgacgcctggggtcttaatgtggctctggagtggaagccaccccaggatgtcggcaacacggaactctgggggtacacagtgcagaaagccgacaagaagaccatggagtggttcaccgtcttggagcattaccgccgcacccactgcgtggtgccagagctcatcattggcaatggctactacttccgcgtcttcagccagaatatggttggctttagtgacagagcggccaccaccaaggagcccgtctttatccccagaccaggcatcacctatgagccacccaactataaggccctggacttctccgaggccccaagcttcacccagcccctggtgaaccgctcggtcatcgcgggctacactgctatgctctgctgtgctgtccggggtagccccaagcccaagatttcctggttcaagaatggcctggacctgggagaagacgcccgcttccgcatgttcagcaagcagggagtgttgactctggagattagaaagccctgcccctttgacgggggcatctatgtctgcagggccaccaacttacagggcgaggcacggtgtgagtgccgcctggaggtgcgagtgcctcagtgagcggccgccaataaaggatcgtttattttcattggaagcgtgtgttggttttttgatcaggcgcgtccaagcttgcatgctggggagagatctgcggccgcaggaacccctagtgatggagttggccactccctctctgcgcgctcgctcgctcactgaggccgcccgggcaaagcccgggcgtcgggcgacctttggtcgcccggcctcagtgagcgagcgagcgcgcag

SEQ ID NO: 111 - DNA, 4980 bp, synthetic construct
  source 1..4980: mol_type = other DNA
ttggccactccctctctgcgcgctcgctcgctcactgaggccgggcgaccaaaggtcgcccgacgcccgggctttgcccgggcggcctcagtgagcgagcgagcgcgcagagagggagtggccaactccatcactaggggttcctgcggccgcacgcgtctcagtccattaggagccagtagcctggaagatgtctttacccccagcatcagttcaagtggagcagcacataactcttgccctctgccttccaagattctggtgctgagacttatggagtgtcttggaggttgccttctgccccccaaccctgctcccagctggccctcccaggcctgggttgctggcctctgctttatcaggattctcaagagggacagctggtttatgttgcatgactgttccctgcatatctgctctggttttaaatagcttatctgagcagctggaggaccacatgggcttatatggcgtggggtacatgttcctgtagccttgtccctggcacctgccaaaatagcagccaacaccccccacccccaccgccatccccctgccccacccgtcccctgtcgcacattcctccctccgcagggctggctcaccaggccccagcccacatgcctgcttaaagccctctccatcctctgcctcacccagtccccgctgagactgagcagacgcctccaggatctgtcggcagggtttagtgaaccgtcagatcctgcagaagttggtcgtgaggcactagtgggcaggtaagtatcaaggttacaagacaggtttaaggagaccaatagaaactgggcttgtcgagacagagaagactcttgcgtttctgataggcacctattggtcttactgacatccactttgcctttctctccacaggtgtactagtccgccaccatgcctgagccggggaagaagccagtctcagcttttagcaagaagccacggtcagtggaagtggccgcaggcagccctgccgtgttcgaggccgagacagagcgggcaggagtgaaggtgcgctggcagcgcggaggcagtgacatcagcgccagcaacaagtacggcctggccacagagggcacacggcatacgctgacagtgcgggaagtgggccctgccgaccagggatcttacgcagtcattgctggctcctccaaggtcaagttcgacctcaaggtcatagaggcagagaaggcagagcccatgctggcccctgcccctgcccctgctgaggccactggagcccctggagaagccccggccccagccgctgagctgggagaaagtgccccaagtcccaaagggtcaagctcagcagctctcaatggtcctacccctggagcccccgatgaccccattggcctcttcgtgatgcggccacaggatggcgaggtgaccgtgggtggcagcatcaccttctcagcccgcgtggccggcgccagcctcctgaagccgcctgtggtcaagtggttcaagggcaaatgggtggacctgagcagcaaggtgggccagcacctgcagctgcacgacagctacgaccgcgccagcaaggtctatctgttcgagctgcacatcaccgatgcccagcctgccttcactggcagctaccgctgtgaggtgtccaccaaggacaaatttgactgctccaacttcaatctcactgtccacgaggccatgggcaccggagacctggacctcctatcagccttccgccgcacgagcctggctggaggtggtcggcggatcagtgatagccatgaggacactgggattctggacttcagctcactgctgaaaaagagagacagtttccggaccccgagggactcgaagctggaggcaccagcagaggaggacgtgtgggagatcctacggcaggcacccccatctgagtacgagcgcatcgccttccagtacggcgtcactgacctgcgcggcatgctaaagaggctcaagggcatgaggcgcgatgagaagaagagcacagcctttcagaagaagctggagccggcctaccaggtgagcaaaggccacaagatccggctgaccgtggaactggctgaccatgacgctgaggtcaaatggctcaagaatggccaggagatccagatgagcggcagcaagtacatctttgagtccatcggtgccaagcgtaccctgaccatcagccagtgctcattggcggacgacgcagcctaccagtgcgtggtgggtggcgagaagtgtagcacggagctctttgtgaaagagccccctgtgctcatcacgcgccccttggaggaccagctggtgatggtggggcagcgggtggagtttgagtgtgaagtatcggaggagggggcgcaagtcaaatggctgaaggacggggtggagctgacccgggaggagaccttcaaataccggttcaagaaggacgggcagagacaccacctgatcatcaacgaggccatgctggaggacgcggggcactatgcactgtgcactagcgggggccaggcgctggctgagctcattgtgcaggaaaagaagctggaggtgtaccagagcatcgcagacctgatggtgggcgcaaaggaccaggcggtgttcaaatgtgaggtctcagatgagaatgttcggggtgtgtggctgaagaatgggaaggagctggtgcccgacagccgcataaaggtgtcccacatcgggcgggtccacaaactgaccattgacgacgtcacacctgccgacgaggctgactacagctttgtgcccgagggcttcgcctgcaacctgtcagccaagctccacttcatggaggtcaagattgacttcgtacccaggcaggaacctcccaagatccacctggactgcccaggccgcataccagacaccattgtggttgtagctggaaataagctacgtctggacgtccctatctctggggaccctgctcccactgtgatctggcagaaggctatcacgcaggggaataaggccccagccaggccagccccagatgccccagaggacacaggtgacagcgatgagtgggtgtttgacaagaagctgctgtgtgagaccgagggccgggtccgcgtggagaccaccaaggaccgcagcatcttcacggtcgagggggcagagaaggaagatgagggcgtctacacggtcacagtgaagaaccctgtgggcgaggaccaggtcaacctcacagtcaaggtcatcgacgtgccagacgcacctgcggcccccaagatcagcaacgtgggagaggactcctgcacagtacagtgggagccgcctgcctacgatggcgggcagcccatcctgggctacatcctggagcgcaagaagaagaagagctaccggtggatgcggctgaacttcgacctgattcaggagctgagtcatgaagcgcggcgcatgatcgagggcgtggtgtacgagatgcgcgtctacgcggtcaacgccatcggcatgtccaggcccagccctgcctcccagcccttcatgcctatcggtccccccagcgaacccacccacctggcagtagaggacgtctctgacaccacggtctccctcaagtggcggcccccagagcgcgtgggagcaggaggcctggatggctacagcgtggagtactgcccagagggctgctcagagtgggtggctgccctgcaggggctgacagagcacacatcgatactggtgaaggacctgcccacgggggcccggctgcttttccgagtgcgggcacacaatatggcagggcctggagcccctgttaccaccacggagccggtgacagtgcaggagatcctgcaacggccacggcttcagctgcccaggcacctgcgccagaccattcagaagaaggtcggggagcctgtgaaccttctcatccctttccagggcaagccccggcctcaggtgacctggaccaaagaggggcagcccctggcaggcgaggaggtgagcatccgcaacagccccacagacaccatcctgttcatccgggccgctcgccgcgtgcattcaggcacttaccaggtgacggtgcgcattgagaacatggaggacaaggccacgctggtgctgcaggttgttgacaagccaagtcctccccaggatctccgggtgactgacgcctggggtcttaatgtggctctggagtggaagccaccccaggatgtcggcaacacggaactctgggggtacacagtgcagaaagccgacaagaagaccatggagtggttcaccgtcttggagcattaccgccgcacccactgcgtggtgccagagctcatcattggcaatggctactacttccgcgtcttcagccagaatatggttggctttagtgacagagcggccaccaccaaggagcccgtctttatccccagaccaggcatcacctatgagccacccaactataaggccctggacttctccgaggccccaagcttcacccagcccctggtgaaccgctcggtcatcgcgggctacactgctatgctctgctgtgctgtccggggtagccccaagcccaagatttcctggttcaagaatggcctggacctgggagaagacgcccgcttccgcatgttcagcaagcagggagtgttgactctggagattagaaagccctgcccctttgacgggggcatctatgtctgcagggccaccaacttacagggcgaggcacggtgtgagtgccgcctggaggtgcgagtgcctcagtgagcggccgccaataaaggatcgtttattttcattggaagcgtgtgttggttttttgatcaggcgcgtccaagcttgcatgctggggagagatctgcggccgcaggaacccctagtgatggagttggccactccctctctgcgcgctcgctcgctcactgaggccgcccgggcaaagcccgggcgtcgggcgacctttggtcgcccggcctcagtgagcgagcgagcgcgcagagagggagtggccaa

SEQ ID NO: 112 - DNA, 4950 bp, synthetic construct
  source 1..4950: mol_type = other DNA
ctgcgcgctcgctcgctcactgaggccgcccgggcaaagcccgggcgtcgggcgacctttggtcgcccggcctcagtgagcgagcgagcgcgcagagagggagtggccaactccatcactaggggttcctgcggccgcacgcgtctcagtccattaggagccagtagcctggaagatgtctttacccccagcatcagttcaagtggagcagcacataactcttgccctctgccttccaagattctggtgctgagacttatggagtgtcttggaggttgccttctgccccccaaccctgctcccagctggccctcccaggcctgggttgctggcctctgctttatcaggattctcaagagggacagctggtttatgttgcatgactgttccctgcatatctgctctggttttaaatagcttatctgagcagctggaggaccacatgggcttatatggcgtggggtacatgttcctgtagccttgtccctggcacctgccaaaatagcagccaacaccccccacccccaccgccatccccctgccccacccgtcccctgtcgcacattcctccctccgcagggctggctcaccaggccccagcccacatgcctgcttaaagccctctccatcctctgcctcacccagtccccgctgagactgagcagacgcctccaggatctgtcggcagggtttagtgaaccgtcagatcctgcagaagttggtcgtgaggcactagtgggcaggtaagtatcaaggttacaagacaggtttaaggagaccaatagaaactgggcttgtcgagacagagaagactcttgcgtttctgataggcacctattggtcttactgacatccactttgcctttctctccacaggtgtactagtccgccaccatgcctgagccggggaagaagccagtctcagcttttagcaagaagccacggtcagtggaagtggccgcaggcagccctgccgtgttcgaggccgagacagagcgggcaggagtgaaggtgcgctggcagcgcggaggcagtgacatcagcgccagcaacaagtacggcctggccacagagggcacacggcatacgctgacagtgcgggaagtgggccctgccgaccagggatcttacgcagtcattgctggctcctccaaggtcaagttcgacctcaaggtcatagaggcagagaaggcagagcccatgctggcccctgcccctgcccctgctgaggccactggagcccctggagaagccccggccccagccgctgagctgggagaaagtgccccaagtcccaaagggtcaagctcagcagctctcaatggtcctacccctggagcccccgatgaccccattggcctcttcgtgatgcggccacaggatggcgaggtgaccgtgggtggcagcatcaccttctcagcccgcgtggccggcgccagcctcctgaagccgcctgtggtcaagtggttcaagggcaaatgggtggacctgagcagcaaggtgggccagcacctgcagctgcacgacagctacgaccgcgccagcaaggtctatctgttcgagctgcacatcaccgatgcccagcctgccttcactggcagctaccgctgtgaggtgtccaccaaggacaaatttgactgctccaacttcaatctcactgtccacgaggccatgggcaccggagacctggacctcctatcagccttccgccgcacgagcctggctggaggtggtcggcggatcagtgatagccatgaggacactgggattctggacttcagctcactgctgaaaaagagagacagtttccggaccccgagggactcgaagctggaggcaccagcagaggaggacgtgtgggagatcctacggcaggcacccccatctgagtacgagcgcatcgccttccagtacggcgtcactgacctgcgcggcatgctaaagaggctcaagggcatgaggcgcgatgagaagaagagcacagcctttcagaagaagctggagccggcctaccaggtgagcaaaggccacaagatccggctgaccgtggaactggctgaccatgacgctgaggtcaaatggctcaagaatggccaggagatccagatgagcggcagcaagtacatctttgagtccatcggtgccaagcgtaccctgaccatcagccagtgctcattggcggacgacgcagcctaccagtgcgtggtgggtggcgagaagtgtagcacggagctctttgtgaaagagccccctgtgctcatcacgcgccccttggaggaccagctggtgatggtggggcagcgggtggagtttgagtgtgaagtatcggaggagggggcgcaagtcaaatggctgaaggacggggtggagctgacccgggaggagaccttcaaataccggttcaagaaggacgggcagagacaccacctgatcatcaacgaggccatgctggaggacgcggggcactatgcactgtgcactagcgggggccaggcgctggctgagctcattgtgcaggaaaagaagctggaggtgtaccagagcatcgcagacctgatggtgggcgcaaaggaccaggcggtgttcaaatgtgaggtctcagatgagaatgttcggggtgtgtggctgaagaatgggaaggagctggtgcccgacagccgcataaaggtgtcccacatcgggcgggtccacaaactgaccattgacgacgtcacacctgccgacgaggctgactacagctttgtgcccgagggcttcgcctgcaacctgtcagccaagctccacttcatggaggtcaagattgacttcgtacccaggcaggaacctcccaagatccacctggactgcccaggccgcataccagacaccattgtggttgtagctggaaataagctacgtctggacgtccctatctctggggaccctgctcccactgtgatctggcagaaggctatcacgcaggggaataaggccccagccaggccagccccagatgccccagaggacacaggtgacagcgatgagtgggtgtttgacaagaagctgctgtgtgagaccgagggccgggtccgcgtggagaccaccaaggaccgcagcatcttcacggtcgagggggcagagaaggaagatgagggcgtctacacggtcacagtgaagaaccctgtgggcgaggaccaggtcaacctcacagtcaaggtcatcgacgtgccagacgcacctgcggcccccaagatcagcaacgtgggagaggactcctgcacagtacagtgggagccgcctgcctacgatggcgggcagcccatcctgggctacatcctggagcgcaagaagaagaagagctaccggtggatgcggctgaacttcgacctgattcaggagctgagtcatgaagcgcggcgcatgatcgagggcgtggtgtacgagatgcgcgtctacgcggtcaacgccatcggcatgtccaggcccagccctgcctcccagcccttcatgcctatcggtccccccagcgaacccacccacctggcagtagaggacgtctctgacaccacggtctccctcaagtggcggcccccagagcgcgtgggagcaggaggcctggatggctacagcgtggagtactgcccagagggctgctcagagtgggtggctgccctgcaggggctgacagagcacacatcgatactggtgaaggacctgcccacgggggcccggctgcttttccgagtgcgggcacacaatatggcagggcctggagcccctgttaccaccacggagccggtgacagtgcaggagatcctgcaacggccacggcttcagctgcccaggcacctgcgccagaccattcagaagaaggtcggggagcctgtgaaccttctcatccctttccagggcaagccccggcctcaggtgacctggaccaaagaggggcagcccctggcaggcgaggaggtgagcatccgcaacagccccacagacaccatcctgttcatccgggccgctcgccgcgtgcattcaggcacttaccaggtgacggtgcgcattgagaacatggaggacaaggccacgctggtgctgcaggttgttgacaagccaagtcctccccaggatctccgggtgactgacgcctggggtcttaatgtggctctggagtggaagccaccccaggatgtcggcaacacggaactctgggggtacacagtgcagaaagccgacaagaagaccatggagtggttcaccgtcttggagcattaccgccgcacccactgcgtggtgccagagctcatcattggcaatggctactacttccgcgtcttcagccagaatatggttggctttagtgacagagcggccaccaccaaggagcccgtctttatccccagaccaggcatcacctatgagccacccaactataaggccctggacttctccgaggccccaagcttcacccagcccctggtgaaccgctcggtcatcgcgggctacactgctatgctctgctgtgctgtccggggtagccccaagcccaagatttcctggttcaagaatggcctggacctgggagaagacgcccgcttccgcatgttcagcaagcagggagtgttgactctggagattagaaagccctgcccctttgacgggggcatctatgtctgcagggccaccaacttacagggcgaggcacggtgtgagtgccgcctggaggtgcgagtgcctcagtgagcggccgccaataaaggatcgtttattttcattggaagcgtgtgttggttttttgatcaggcgcgtccaagcttgcatgctggggagagatctgcggccgcaggaacccctagtgatggagttggccactccctctctgcgcgctcgctcgctcactgaggccgcccgggcaaagcccgggcgtcgggcgacctttggtcgcccggcctcagtgagcgagcgagcgcgcag

SEQ ID NO: 113 - DNA, 4980 bp, synthetic construct
  source 1..4980: mol_type = other DNA
ttggccactccctctctgcgcgctcgctcgctcactgaggccgcccgggcaaagcccgggcgtcgggcgacctttggtcgcccggcctcagtgagcgagcgagcgcgcagagagggagtggccaactccatcactaggggttcctgcggccgcacgcgtctcagtccattaggagccagtagcctggaagatgtctttacccccagcatcagttcaagtggagcagcacataactcttgccctctgccttccaagattctggtgctgagacttatggagtgtcttggaggttgccttctgccccccaaccctgctcccagctggccctcccaggcctgggttgctggcctctgctttatcaggattctcaagagggacagctggtttatgttgcatgactgttccctgcatatctgctctggttttaaatagcttatctgagcagctggaggaccacatgggcttatatggcgtggggtacatgttcctgtagccttgtccctggcacctgccaaaatagcagccaacaccccccacccccaccgccatccccctgccccacccgtcccctgtcgcacattcctccctccgcagggctggctcaccaggccccagcccacatgcctgcttaaagccctctccatcctctgcctcacccagtccccgctgagactgagcagacgcctccaggatctgtcggcagggtttagtgaaccgtcagatcctgcagaagttggtcgtgaggcactagtgggcaggtaagtatcaaggttacaagacaggtttaaggagaccaatagaaactgggcttgtcgagacagagaagactcttgcgtttctgataggcacctattggtcttactgacatccactttgcctttctctccacaggtgtactagtccgccaccatgcctgagccggggaagaagccagtctcagcttttagcaagaagccacggtcagtggaagtggccgcaggcagccctgccgtgttcgaggccgagacagagcgggcaggagtgaaggtgcgctggcagcgcggaggcagtgacatcagcgccagcaacaagtacggcctggccacagagggcacacggcatacgctgacagtgcgggaagtgggccctgccgaccagggatcttacgcagtcattgctggctcctccaaggtcaagttcgacctcaaggtcatagaggcagagaaggcagagcccatgctggcccctgcccctgcccctgctgaggccactggagcccctggagaagccccggccccagccgctgagctgggagaaagtgccccaagtcccaaagggtcaagctcagcagctctcaatggtcctacccctggagcccccgatgaccccattggcctcttcgtgatgcggccacaggatggcgaggtgaccgtgggtggcagcatcaccttctcagcccgcgtggccggcgccagcctcctgaagccgcctgtggtcaagtggttcaagggcaaatgggtggacctgagcagcaaggtgggccagcacctgcagctgcacgacagctacgaccgcgccagcaaggtctatctgttcgagctgcacatcaccgatgcccagcctgccttcactggcagctaccgctgtgaggtgtccaccaaggacaaatttgactgctccaacttcaatctcactgtccacgaggccatgggcaccggagacctggacctcctatcagccttccgccgcacgagcctggctggaggtggtcggcggatcagtgatagccatgaggacactgggattctggacttcagctcactgctgaaaaagagagacagtttccggaccccgagggactcgaagctggaggcaccagcagaggaggacgtgtgggagatcctacggcaggcacccccatctgagtacgagcgcatcgccttccagtacggcgtcactgacctgcgcggcatgctaaagaggctcaagggcatgaggcgcgatgagaagaagagcacagcctttcagaagaagctggagccggcctaccaggtgagcaaaggccacaagatccggctgaccgtggaactggctgaccatgacgctgaggtcaaatggctcaagaatggccaggagatccagatgagcggcagcaagtacatctttgagtccatcggtgccaagcgtaccctgaccatcagccagtgctcattggcggacgacgcagcctaccagtgcgtggtgggtggcgagaagtgtagcacggagctctttgtgaaagagccccctgtgctcatcacgcgccccttggaggaccagctggtgatggtggggcagcgggtggagtttgagtgtgaagtatcggaggagggggcgcaagtcaaatggctgaaggacggggtggagctgacccgggaggagaccttcaaataccggttcaagaaggacgggcagagacaccacctgatcatcaacgaggccatgctggaggacgcggggcactatgcactgtgcactagcgggggccaggcgctggctgagctcattgtgcaggaaaagaagctggaggtgtaccagagcatcgcagacctgatggtgggcgcaaaggaccaggcggtgttcaaatgtgaggtctcagatgagaatgttcggggtgtgtggctgaagaatgggaaggagctggtgcccgacagccgcataaaggtgtcccacatcgggcgggtccacaaactgaccattgacgacgtcacacctgccgacgaggctgactacagctttgtgcccgagggcttcgcctgcaacctgtcagccaagctccacttcatggaggtcaagattgacttcgtacccaggcaggaacctcccaagatccacctggactgcccaggccgcataccagacaccattgtggttgtagctggaaataagctacgtctggacgtccctatctctggggaccctgctcccactgtgatctggcagaaggctatcacgcaggggaataaggccccagccaggccagccccagatgccccagaggacacaggtgacagcgatgagtgggtgtttgacaagaagctgctgtgtgagaccgagggccgggtccgcgtggagaccaccaaggaccgcagcatcttcacggtcgagggggcagagaaggaagatgagggcgtctacacggtcacagtgaagaaccctgtgggcgaggaccaggtcaacctcacagtcaaggtcatcgacgtgccagacgcacctgcggcccccaagatcagcaacgtgggagaggactcctgcacagtacagtgggagccgcctgcctacgatggcgggcagcccatcctgggctacatcctggagcgcaagaagaagaagagctaccggtggatgcggctgaacttcgacctgattcaggagctgagtcatgaagcgcggcgcatgatcgagggcgtggtgtacgagatgcgcgtctacgcggtcaacgccatcggcatgtccaggcccagccctgcctcccagcccttcatgcctatcggtccccccagcgaacccacccacctggcagtagaggacgtctctgacaccacggtctccctcaagtggcggcccccagagcgcgtgggagcaggaggcctggatggctacagcgtggagtactgcccagagggctgctcagagtgggtggctgccctgcaggggctgacagagcacacatcgatactggtgaaggacctgcccacgggggcccggctgcttttccgagtgcgggcacacaatatggcagggcctggagcccctgttaccaccacggagccggtgacagtgcaggagatcctgcaacggccacggcttcagctgcccaggcacctgcgccagaccattcagaagaaggtcggggagcctgtgaaccttctcatccctttccagggcaagccccggcctcaggtgacctggaccaaagaggggcagcccctggcaggcgaggaggtgagcatccgcaacagccccacagacaccatcctgttcatccgggccgctcgccgcgtgcattcaggcacttaccaggtgacggtgcgcattgagaacatggaggacaaggccacgctggtgctgcaggttgttgacaagccaagtcctccccaggatctccgggtgactgacgcctggggtcttaatgtggctctggagtggaagccaccccaggatgtcggcaacacggaactctgggggtacacagtgcagaaagccgacaagaagaccatggagtggttcaccgtcttggagcattaccgccgcacccactgcgtggtgccagagctcatcattggcaatggctactacttccgcgtcttcagccagaatatggttggctttagtgacagagcggccaccaccaaggagcccgtctttatccccagaccaggcatcacctatgagccacccaactataaggccctggacttctccgaggccccaagcttcacccagcccctggtgaaccgctcggtcatcgcgggctacactgctatgctctgctgtgctgtccggggtagccccaagcccaagatttcctggttcaagaatggcctggacctgggagaagacgcccgcttccgcatgttcagcaagcagggagtgttgactctggagattagaaagccctgcccctttgacgggggcatctatgtctgcagggccaccaacttacagggcgaggcacggtgtgagtgccgcctggaggtgcgagtgcctcagtgagcggccgccaataaaggatcgtttattttcattggaagcgtgtgttggttttttgatcaggcgcgtccaagcttgcatgctggggagagatctgcggccgcaggaacccctagtgatggagttggccactccctctctgcgcgctcgctcgctcactgaggccgcccgggcaaagcccgggcgtcgggcgacctttggtcgcccggcctcagtgagcgagcgagcgcgcagagagggagtggccaa

SEQ ID NO: 114 - DNA, 4950 bp, synthetic construct
  source 1..4950: mol_type = other DNA
ctgcgcgctcgctcgctcactgaggccgggcgaccaaaggtcgcccgacgcccgggctttgcccgggcggcctcagtgagcgagcgagcgcgcagagagggagtggccaactccatcactaggggttcctgcggccgcacgcgtctcagtccattaggagccagtagcctggaagatgtctttacccccagcatcagttcaagtggagcagcacataactcttgccctctgccttccaagattctggtgctgagacttatggagtgtcttggaggttgccttctgccccccaaccctgctcccagctggccctcccaggcctgggttgctggcctctgctttatcaggattctcaagagggacagctggtttatgttgcatgactgttccctgcatatctgctctggttttaaatagcttatctgagcagctggaggaccacatgggcttatatggcgtggggtacatgttcctgtagccttgtccctggcacctgccaaaatagcagccaacaccccccacccccaccgccatccccctgccccacccgtcccctgtcgcacattcctccctccgcagggctggctcaccaggccccagcccacatgcctgcttaaagccctctccatcctctgcctcacccagtccccgctgagactgagcagacgcctccaggatctgtcggcagggtttagtgaaccgtcagatcctgcagaagttggtcgtgaggcactagtgggcaggtaagtatcaaggttacaagacaggtttaaggagaccaatagaaactgggcttgtcgagacagagaagactcttgcgtttctgataggcacctattggtcttactgacatccactttgcctttctctccacaggtgtactagtccgccaccatgcctgagccggggaagaagccagtctcagcttttagcaagaagccacggtcagtggaagtggccgcaggcagccctgccgtgttcgaggccgagacagagcgggcaggagtgaaggtgcgctggcagcgcggaggcagtgacatcagcgccagcaacaagtacggcctggccacagagggcacacggcatacgctgacagtgcgggaagtgggccctgccgaccagggatcttacgcagtcattgctggctcctccaaggtcaagttcgacctcaaggtcatagaggcagagaaggcagagcccatgctggcccctgcccctgcccctgctgaggccactggagcccctggagaagccccggccccagccgctgagctgggagaaagtgccccaagtcccaaagggtcaagctcagcagctctcaatggtcctacccctggagcccccgatgaccccattggcctcttcgtgatgcggccacaggatggcgaggtgaccgtgggtggcagcatcaccttctcagcccgcgtggccggcgccagcctcctgaagccgcctgtggtcaagtggttcaagggcaaatgggtggacctgagcagcaaggtgggccagcacctgcagctgcacgacagctacgaccgcgccagcaaggtctatctgttcgagctgcacatcaccgatgcccagcctgccttcactggcagctaccgctgtgaggtgtccaccaaggacaaatttgactgctccaacttcaatctcactgtccacgaggccatgggcaccggagacctggacctcctatcagccttccgccgcacgagcctggctggaggtggtcggcggatcagtgatagccatgaggacactgggattctggacttcagctcactgctgaaaaagagagacagtttccggaccccgagggactcgaagctggaggcaccagcagaggaggacgtgtgggagatcctacggcaggcacccccatctgagtacgagcgcatcgccttccagtacggcgtcactgacctgcgcggcatgctaaagaggctcaagggcatgaggcgcgatgagaagaagagcacagcctttcagaagaagctggagccggcctaccaggtgagcaaaggccacaagatccggctgaccgtggaactggctgaccatgacgctgaggtcaaatggctcaagaatggccaggagatccagatgagcggcagcaagtacatctttgagtccatcggtgccaagcgtaccctgaccatcagccagtgctcattggcggacgacgcagcctaccagtgcgtggtgggtggcgagaagtgtagcacggagctctttgtgaaagagccccctgtgctcatcacgcgccccttggaggaccagctggtgatggtggggcagcgggtggagtttgagtgtgaagtatcggaggagggggcgcaagtcaaatggctgaaggacggggtggagctgacccgggaggagaccttcaaataccggttcaagaaggacgggcagagacaccacctgatcatcaacgaggccatgctggaggacgcggggcactatgcactgtgcactagcgggggccaggcgctggctgagctcattgtgcaggaaaagaagctggaggtgtaccagagcatcgcagacctgatggtgggcgcaaaggaccaggcggtgttcaaatgtgaggtctcagatgagaatgttcggggtgtgtggctgaagaatgggaaggagctggtgcccgacagccgcataaaggtgtcccacatcgggcgggtccacaaactgaccattgacgacgtcacacctgccgacgaggctgactacagctttgtgcccgagggcttcgcctgcaacctgtcagccaagctccacttcatggaggtcaagattgacttcgtacccaggcaggaacctcccaagatccacctggactgcccaggccgcataccagacaccattgtggttgtagctggaaataagctacgtctggacgtccctatctctggggaccctgctcccactgtgatctggcagaaggctatcacgcaggggaataaggccccagccaggccagccccagatgccccagaggacacaggtgacagcgatgagtgggtgtttgacaagaagctgctgtgtgagaccgagggccgggtccgcgtggagaccaccaaggaccgcagcatcttcacggtcgagggggcagagaaggaagatgagggcgtctacacggtcacagtgaagaaccctgtgggcgaggaccaggtcaacctcacagtcaaggtcatcgacgtgccagacgcacctgcggcccccaagatcagcaacgtgggagaggactcctgcacagtacagtgggagccgcctgcctacgatggcgggcagcccatcctgggctacatcctggagcgcaagaagaagaagagctaccggtggatgcggctgaacttcgacctgattcaggagctgagtcatgaagcgcggcgcatgatcgagggcgtggtgtacgagatgcgcgtctacgcggtcaacgccatcggcatgtccaggcccagccctgcctcccagcccttcatgcctatcggtccccccagcgaacccacccacctggcagtagaggacgtctctgacaccacggtctccctcaagtggcggcccccagagcgcgtgggagcaggaggcctggatggctacagcgtggagtactgcccagagggctgctcagagtgggtggctgccctgcaggggctgacagagcacacatcgatactggtgaaggacctgcccacgggggcccggctgcttttccgagtgcgggcacacaatatggcagggcctggagcccctgttaccaccacggagccggtgacagtgcaggagatcctgcaacggccacggcttcagctgcccaggcacctgcgccagaccattcagaagaaggtcggggagcctgtgaaccttctcatccctttccagggcaagccccggcctcaggtgacctggaccaaagaggggcagcccctggcaggcgaggaggtgagcatccgcaacagccccacagacaccatcctgttcatccgggccgctcgccgcgtgcattcaggcacttaccaggtgacggtgcgcattgagaacatggaggacaaggccacgctggtgctgcaggttgttgacaagccaagtcctccccaggatctccgggtgactgacgcctggggtcttaatgtggctctggagtggaagccaccccaggatgtcggcaacacggaactctgggggtacacagtgcagaaagccgacaagaagaccatggagtggttcaccgtcttggagcattaccgccgcacccactgcgtggtgccagagctcatcattggcaatggctactacttccgcgtcttcagccagaatatggttggctttagtgacagagcggccaccaccaaggagcccgtctttatccccagaccaggcatcacctatgagccacccaactataaggccctggacttctccgaggccccaagcttcacccagcccctggtgaaccgctcggtcatcgcgggctacactgctatgctctgctgtgctgtccggggtagccccaagcccaagatttcctggttcaagaatggcctggacctgggagaagacgcccgcttccgcatgttcagcaagcagggagtgttgactctggagattagaaagccctgcccctttgacgggggcatctatgtctgcagggccaccaacttacagggcgaggcacggtgtgagtgccgcctggaggtgcgagtgcctcagtgagcggccgccaataaaggatcgtttattttcattggaagcgtgtgttggttttttgatcaggcgcgtccaagcttgcatgctggggagagatctgcggccgcaggaacccctagtgatggagttggccactccctctctgcgcgctcgctcgctcactgaggccgggcgaccaaaggtcgcccgacgcccgggctttgcccgggcggcctcagtgagcgagcgagcgcgcag

SEQ ID NO: 115 - DNA, 4980 bp, synthetic construct
  source 1..4980: mol_type = other DNA
ttggccactccctctctgcgcgctcgctcgctcactgaggccgggcgaccaaaggtcgcccgacgcccgggctttgcccgggcggcctcagtgagcgagcgagcgcgcagagagggagtggccaactccatcactaggggttcctgcggccgcacgcgtctcagtccattaggagccagtagcctggaagatgtctttacccccagcatcagttcaagtggagcagcacataactcttgccctctgccttccaagattctggtgctgagacttatggagtgtcttggaggttgccttctgccccccaaccctgctcccagctggccctcccaggcctgggttgctggcctctgctttatcaggattctcaagagggacagctggtttatgttgcatgactgttccctgcatatctgctctggttttaaatagcttatctgagcagctggaggaccacatgggcttatatggcgtggggtacatgttcctgtagccttgtccctggcacctgccaaaatagcagccaacaccccccacccccaccgccatccccctgccccacccgtcccctgtcgcacattcctccctccgcagggctggctcaccaggccccagcccacatgcctgcttaaagccctctccatcctctgcctcacccagtccccgctgagactgagcagacgcctccaggatctgtcggcagggtttagtgaaccgtcagatcctgcagaagttggtcgtgaggcactagtgggcaggtaagtatcaaggttacaagacaggtttaaggagaccaatagaaactgggcttgtcgagacagagaagactcttgcgtttctgataggcacctattggtcttactgacatccactttgcctttctctccacaggtgtactagtccgccaccatgcctgagccggggaagaagccagtctcagcttttagcaagaagccacggtcagtggaagtggccgcaggcagccctgccgtgttcgaggccgagacagagcgggcaggagtgaaggtgcgctggcagcgcggaggcagtgacatcagcgccagcaacaagtacggcctggccacagagggcacacggcatacgctgacagtgcgggaagtgggccctgccgaccagggatcttacgcagtcattgctggctcctccaaggtcaagttcgacctcaaggtcatagaggcagagaaggcagagcccatgctggcccctgcccctgcccctgctgaggccactggagcccctggagaagccccggccccagccgctgagctgggagaaagtgccccaagtcccaaagggtcaagctcagcagctctcaatggtcctacccctggagcccccgatgaccccattggcctcttcgtgatgcggccacaggatggcgaggtgaccgtgggtggcagcatcaccttctcagcccgcgtggccggcgccagcctcctgaagccgcctgtggtcaagtggttcaagggcaaatgggtggacctgagcagcaaggtgggccagcacctgcagctgcacgacagctacgaccgcgccagcaaggtctatctgttcgagctgcacatcaccgatgcccagcctgccttcactggcagctaccgctgtgaggtgtccaccaaggacaaatttgactgctccaacttcaatctcactgtccacgaggccatgggcaccggagacctggacctcctatcagccttccgccgcacgagcctggctggaggtggtcggcggatcagtgatagccatgaggacactgggattctggacttcagctcactgctgaaaaagagagacagtttccggaccccgagggactcgaagctggaggcaccagcagaggaggacgtgtgggagatcctacggcaggcacccccatctgagtacgagcgcatcgccttccagtacggcgtcactgacctgcgcggcatgctaaagaggctcaagggcatgaggcgcgatgagaagaagagcacagcctttcagaagaagctggagccggcctaccaggtgagcaaaggccacaagatccggctgaccgtggaactggctgaccatgacgctgaggtcaaatggctcaagaatggccaggagatccagatgagcggcagcaagtacatctttgagtccatcggtgccaagcgtaccctgaccatcagccagtgctcattggcggacgacgcagcctaccagtgcgtggtgggtggcgagaagtgtagcacggagctctttgtgaaagagccccctgtgctcatcacgcgccccttggaggaccagctggtgatggtggggcagcgggtggagtttgagtgtgaagtatcggaggagggggcgcaagtcaaatggctgaaggacggggtggagctgacccgggaggagaccttcaaataccggttcaagaaggacgggcagagacaccacctgatcatcaacgaggccatgctggaggacgcggggcactatgcactgtgcactagcgggggccaggcgctggctgagctcattgtgcaggaaaagaagctggaggtgtaccagagcatcgcagacctgatggtgggcgcaaaggaccaggcggtgttcaaatgtgaggtctcagatgagaatgttcggggtgtgtggctgaagaatgggaaggagctggtgcccgacagccgcataaaggtgtcccacatcgggcgggtccacaaactgaccattgacgacgtcacacctgccgacgaggctgactacagctttgtgcccgagggcttcgcctgcaacctgtcagccaagctccacttcatggaggtcaagattgacttcgtacccaggcaggaacctcccaagatccacctggactgcccaggccgcataccagacaccattgtggttgtagctggaaataagctacgtctggacgtccctatctctggggaccctgctcccactgtgatctggcagaaggctatcacgcaggggaataaggccccagccaggccagccccagatgccccagaggacacaggtgacagcgatgagtgggtgtttgacaagaagctgctgtgtgagaccgagggccgggtccgcgtggagaccaccaaggaccgcagcatcttcacggtcgagggggcagagaaggaagatgagggcgtctacacggtcacagtgaagaaccctgtgggcgaggaccaggtcaacctcacagtcaaggtcatcgacgtgccagacgcacctgcggcccccaagatcagcaacgtgggagaggactcctgcacagtacagtgggagccgcctgcctacgatggcgggcagcccatcctgggctacatcctggagcgcaagaagaagaagagctaccggtggatgcggctgaacttcgacctgattcaggagctgagtcatgaagcgcggcgcatgatcgagggcgtggtgtacgagatgcgcgtctacgcggtcaacgccatcggcatgtccaggcccagccctgcctcccagcccttcatgcctatcggtccccccagcgaacccacccacctggcagtagaggacgtctctgacaccacggtctccctcaagtggcggcccccagagcgcgtgggagcaggaggcctggatggctacagcgtggagtactgcccagagggctgctcagagtgggtggctgccctgcaggggctgacagagcacacatcgatactggtgaaggacctgcccacgggggcccggctgcttttccgagtgcgggcacacaatatggcagggcctggagcccctgttaccaccacggagccggtgacagtgcaggagatcctgcaacggccacggcttcagctgcccaggcacctgcgccagaccattcagaagaaggtcggggagcctgtgaaccttctcatccctttccagggcaagccccggcctcaggtgacctggaccaaagaggggcagcccctggcaggcgaggaggtgagcatccgcaacagccccacagacaccatcctgttcatccgggccgctcgccgcgtgcattcaggcacttaccaggtgacggtgcgcattgagaacatggaggacaaggccacgctggtgctgcaggttgttgacaagccaagtcctccccaggatctccgggtgactgacgcctggggtcttaatgtggctctggagtggaagccaccccaggatgtcggcaacacggaactctgggggtacacagtgcagaaagccgacaagaagaccatggagtggttcaccgtcttggagcattaccgccgcacccactgcgtggtgccagagctcatcattggcaatggctactacttccgcgtcttcagccagaatatggttggctttagtgacagagcggccaccaccaaggagcccgtctttatccccagaccaggcatcacctatgagccacccaactataaggccctggacttctccgaggccccaagcttcacccagcccctggtgaaccgctcggtcatcgcgggctacactgctatgctctgctgtgctgtccggggtagccccaagcccaagatttcctggttcaagaatggcctggacctgggagaagacgcccgcttccgcatgttcagcaagcagggagtgttgactctggagattagaaagccctgcccctttgacgggggcatctatgtctgcagggccaccaacttacagggcgaggcacggtgtgagtgccgcctggaggtgcgagtgcctcagtgagcggccgccaataaaggatcgtttattttcattggaagcgtgtgttggttttttgatcaggcgcgtccaagcttgcatgctggggagagatctgcggccgcaggaacccctagtgatggagttggccactccctctctgcgcgctcgctcgctcactgaggccgggcgaccaaaggtcgcccgacgcccgggctttgcccgggcggcctcagtgagcgagcgagcgcgcagagagggagtggccaa

SEQ ID NO: 116 - DNA, 4950 bp, synthetic construct
  source 1..4950: mol_type = other DNA
ctgcgcgctcgctcgctcactgaggccgggcgaccaaaggtcgcccgacgcccgggctttgcccgggcggcctcagtgagcgagcgagcgcgcagagagggagtggccaactccatcactaggggttcctgcggccgcacgcgtctcagtccattaggagccagtagcctggaagatgtctttacccccagcatcagttcaagtggagcagcacataactcttgccctctgccttccaagattctggtgctgagacttatggagtgtcttggaggttgccttctgccccccaaccctgctcccagctggccctcccaggcctgggttgctggcctctgctttatcaggattctcaagagggacagctggtttatgttgcatgactgttccctgcatatctgctctggttttaaatagcttatctgagcagctggaggaccacatgggcttatatggcgtggggtacatgttcctgtagccttgtccctggcacctgccaaaatagcagccaacaccccccacccccaccgccatccccctgccccacccgtcccctgtcgcacattcctccctccgcagggctggctcaccaggccccagcccacatgcctgcttaaagccctctccatcctctgcctcacccagtccccgctgagactgagcagacgcctccaggatctgtcggcagggtttagtgaaccgtcagatcctgcagaagttggtcgtgaggcactagtgggcaggtaagtatcaaggttacaagacaggtttaaggagaccaatagaaactgggcttgtcgagacagagaagactcttgcgtttctgataggcacctattggtcttactgacatccactttgcctttctctccacaggtgtactagtccgccaccatgcctgagcctggcaagaaacctgtgtctgccttcagcaaaaagcccagatctgtggaagtggctgctggcagccctgctgtgtttgaggctgagactgagagagctggggtcaaagtcagatggcagagaggaggctctgacatctctgccagcaacaaatatggcctggccacagagggcaccagacacaccctgacagtcagagaagtgggccctgctgaccagggcagctatgctgtgattgctggctccagcaaagtgaagtttgacctgaaagtgattgaggcagagaaggctgagcccatgctggcaccagctccagcaccagctgaagctactggtgctcctggggaagctcctgctcctgctgctgaactgggagagtctgccccatctcctaagggctctagctctgctgccctgaatggccctacacctggggctccagatgaccccattggcctgtttgtgatgaggccccaggatggggaagtgacagttggaggcagcatcaccttttctgccagagtggctggggccagcctgctgaaacctcctgtggtcaagtggttcaaaggcaaatgggttgacctgtcctccaaagtgggccagcacctccagctgcatgacagctatgatagggccagcaaggtgtacctgtttgagctgcacatcacagatgcccagccagccttcacaggcagctacagatgtgaagtgtccaccaaggacaagtttgactgcagcaacttcaacctgacagtgcatgaggccatgggcacaggggaccttgatctgctgtcagccttcagaagaaccagcctggctggtggtggcagaagaatctctgacagccatgaggacacaggcatcctggacttcagctccctgctgaagaagagagacagcttcagaacccctagggacagcaagctggaagccccagctgaggaagatgtctgggagatcctgagacaggcccctccatctgagtatgagagaattgccttccagtatggggtcacagacctgagaggcatgctgaagagactgaagggcatgagaagagatgagaagaagtccacagccttccagaaaaagctggaacctgcctaccaggtgtccaagggccacaagatcagactgacagtggaactggctgaccatgatgctgaagtgaagtggctcaagaatggccaagagatccaaatgtctggcagcaagtacatctttgagagcattggagccaagaggaccctgaccatcagccagtgtagcctggcagatgatgcagcctatcagtgtgttgttggtggagagaagtgcagcacagagctgtttgtcaaagaacctccagtgctgatcaccaggcctctggaagatcagctggtcatggttggacagagggttgagtttgagtgtgaagtctctgaagagggtgcccaagtgaaatggctgaaagatggggttgagctgaccagagaggaaaccttcaagtacaggttcaagaaggatggccagaggcaccacctgatcatcaatgaagccatgctggaagatgctggccactatgccctgtgcaccagtggtggacaagccctggctgagctgattgtgcaagagaagaaactggaagtgtaccagagcattgctgacctgatggttggagctaaggaccaggctgtgttcaagtgtgaagtgtcagatgagaatgtcagaggagtgtggttgaagaatgggaaagaactggtgcctgactccaggatcaaggtgtcccacattggcagagtgcacaagctgacaattgatgatgtgacccctgctgatgaggctgactacagctttgtgcctgagggctttgcctgcaacctgtctgccaagctgcactttatggaagtcaagattgactttgtgcccaggcaagagcctccaaagatccacctggattgccctggcagaatcccagacaccattgtggttgtggctggcaacaagctgaggctggatgtgcccatctctggggaccctgctcctacagtgatttggcagaaggccatcacacagggcaacaaggcccctgctagacctgcacctgatgctccagaggacactggggactctgatgagtgggtgtttgacaagaaactgctgtgtgaaactgagggcagagtcagagtggaaaccacaaaggacagatccatcttcacagtggaaggggctgagaaagaggatgaaggggtctacacagtgacagtgaagaaccctgtgggagaagatcaagtgaacctgactgtgaaagtcattgatgtgcctgatgcaccagcagctcccaagatcagcaatgttggagaggacagctgcacagtgcagtgggagcctccagcctatgatggtggacagcctatcctgggctacatcctggaaagaaagaagaaaaagtcctacagatggatgaggctcaactttgatctgatccaagagctgagccatgaagctagaaggatgattgaaggggttgtgtatgagatgagagtgtatgcagtgaatgccattggcatgagcagaccctctccagcctctcagccctttatgcctattggcccaccttctgagcccacacacctggcagtggaagatgtgtctgacaccacagtgtccctgaagtggaggccacctgagagagttggagctggaggcctggatggctactctgtggaatactgcccagagggctgctctgagtgggttgcagctctgcagggactgacagagcacacctccatcctggtcaaggatctgcctacaggggctagactgctgttcagagttagggcccacaacatggctggaccaggggctcctgtgaccacaacagaacctgtgactgtgcaagaaatcctgcagaggcccagactgcagctgcctagacatctgagacagaccatccagaagaaagttggggagcctgtgaacctgctgatcccattccaaggcaagcccagacctcaagtgacctggaccaaagagggacagcccctggctggggaagaagtctccatcagaaacagccccactgacaccatcctgttcatcagagctgccagaagagtgcattctggcacctaccaagtgactgttaggattgagaacatggaagataaggctaccctggtgctgcaggttgtggataagcctagtcctcctcaggacctcagagtcactgatgcctggggactgaatgtggccctggaatggaagcctccacaggatgtgggcaacactgagctgtggggctatacagtgcagaaggcagataagaaaaccatggaatggttcacagtgctggaacactatagaaggacccactgtgtggtgccagagctgatcattggcaatggctactacttcagggtgttcagccagaatatggttggattctctgatagggcagccactaccaaagaaccagtgttcatccccagacctggcatcacctatgagccacctaactacaaggccctggatttctctgaggcccctagcttcacccagcctctggtcaatagaagtgtgattgcagggtacactgccatgctgtgctgtgcagtcagaggcagccccaagcctaagatctcctggttcaaaaatggactggaccttggggaagatgccagattcagaatgttcagcaagcaaggggtgctgaccctggaaatcagaaagccctgtccttttgatggtggcatctatgtgtgtagagccaccaacctccagggagaagctagatgtgaatgcaggctggaagttagagtgcctcagtgagcggccgccaataaaggatcgtttattttcattggaagcgtgtgttggttttttgatcaggcgcgtccaagcttgcatgctggggagagatctgcggccgcaggaacccctagtgatggagttggccactccctctctgcgcgctcgctcgctcactgaggccgcccgggcaaagcccgggcgtcgggcgacctttggtcgcccggcctcagtgagcgagcgagcgcgcag

SEQ ID NO: 117 - DNA, 4980 bp, synthetic construct
  source 1..4980: mol_type = other DNA
ttggccactccctctctgcgcgctcgctcgctcactgaggccgggcgaccaaaggtcgcccgacgcccgggctttgcccgggcggcctcagtgagcgagcgagcgcgcagagagggagtggccaactccatcactaggggttcctgcggccgcacgcgtctcagtccattaggagccagtagcctggaagatgtctttacccccagcatcagttcaagtggagcagcacataactcttgccctctgccttccaagattctggtgctgagacttatggagtgtcttggaggttgccttctgccccccaaccctgctcccagctggccctcccaggcctgggttgctggcctctgctttatcaggattctcaagagggacagctggtttatgttgcatgactgttccctgcatatctgctctggttttaaatagcttatctgagcagctggaggaccacatgggcttatatggcgtggggtacatgttcctgtagccttgtccctggcacctgccaaaatagcagccaacaccccccacccccaccgccatccccctgccccacccgtcccctgtcgcacattcctccctccgcagggctggctcaccaggccccagcccacatgcctgcttaaagccctctccatcctctgcctcacccagtccccgctgagactgagcagacgcctccaggatctgtcggcagggtttagtgaaccgtcagatcctgcagaagttggtcgtgaggcactagtgggcaggtaagtatcaaggttacaagacaggtttaaggagaccaatagaaactgggcttgtcgagacagagaagactcttgcgtttctgataggcacctattggtcttactgacatccactttgcctttctctccacaggtgtactagtccgccaccatgcctgagcctggcaagaaacctgtgtctgccttcagcaaaaagcccagatctgtggaagtggctgctggcagccctgctgtgtttgaggctgagactgagagagctggggtcaaagtcagatggcagagaggaggctctgacatctctgccagcaacaaatatggcctggccacagagggcaccagacacaccctgacagtcagagaagtgggccctgctgaccagggcagctatgctgtgattgctggctccagcaaagtgaagtttgacctgaaagtgattgaggcagagaaggctgagcccatgctggcaccagctccagcaccagctgaagctactggtgctcctggggaagctcctgctcctgctgctgaactgggagagtctgccccatctcctaagggctctagctctgctgccctgaatggccctacacctggggctccagatgaccccattggcctgtttgtgatgaggccccaggatggggaagtgacagttggaggcagcatcaccttttctgccagagtggctggggccagcctgctgaaacctcctgtggtcaagtggttcaaaggcaaatgggttgacctgtcctccaaagtgggccagcacctccagctgcatgacagctatgatagggccagcaaggtgtacctgtttgagctgcacatcacagatgcccagccagccttcacaggcagctacagatgtgaagtgtccaccaaggacaagtttgactgcagcaacttcaacctgacagtgcatgaggccatgggcacaggggaccttgatctgctgtcagccttcagaagaaccagcctggctggtggtggcagaagaatctctgacagccatgaggacacaggcatcctggacttcagctccctgctgaagaagagagacagcttcagaacccctagggacagcaagctggaagccccagctgaggaagatgtctgggagatcctgagacaggcccctccatctgagtatgagagaattgccttccagtatggggtcacagacctgagaggcatgctgaagagactgaagggcatgagaagagatgagaagaagtccacagccttccagaaaaagctggaacctgcctaccaggtgtccaagggccacaagatcagactgacagtggaactggctgaccatgatgctgaagtgaagtggctcaagaatggccaagagatccaaatgtctggcagcaagtacatctttgagagcattggagccaagaggaccctgaccatcagccagtgtagcctggcagatgatgcagcctatcagtgtgttgttggtggagagaagtgcagcacagagctgtttgtcaaagaacctccagtgctgatcaccaggcctctggaagatcagctggtcatggttggacagagggttgagtttgagtgtgaagtctctgaagagggtgcccaagtgaaatggctgaaagatggggttgagctgaccagagaggaaaccttcaagtacaggttcaagaaggatggccagaggcaccacctgatcatcaatgaagccatgctggaagatgctggccactatgccctgtgcaccagtggtggacaagccctggctgagctgattgtgcaagagaagaaactggaagtgtaccagagcattgctgacctgatggttggagctaaggaccaggctgtgttcaagtgtgaagtgtcagatgagaatgtcagaggagtgtggttgaagaatgggaaagaactggtgcctgactccaggatcaaggtgtcccacattggcagagtgcacaagctgacaattgatgatgtgacccctgctgatgaggctgactacagctttgtgcctgagggctttgcctgcaacctgtctgccaagctgcactttatggaagtcaagattgactttgtgcccaggcaagagcctccaaagatccacctggattgccctggcagaatcccagacaccattgtggttgtggctggcaacaagctgaggctggatgtgcccatctctggggaccctgctcctacagtgatttggcagaaggccatcacacagggcaacaaggcccctgctagacctgcacctgatgctccagaggacactggggactctgatgagtgggtgtttgacaagaaactgctgtgtgaaactgagggcagagtcagagtggaaaccacaaaggacagatccatcttcacagtggaaggggctgagaaagaggatgaaggggtctacacagtgacagtgaagaaccctgtgggagaagatcaagtgaacctgactgtgaaagtcattgatgtgcctgatgcaccagcagctcccaagatcagcaatgttggagaggacagctgcacagtgcagtgggagcctccagcctatgatggtggacagcctatcctgggctacatcctggaaagaaagaagaaaaagtcctacagatggatgaggctcaactttgatctgatccaagagctgagccatgaagctagaaggatgattgaaggggttgtgtatgagatgagagtgtatgcagtgaatgccattggcatgagcagaccctctccagcctctcagccctttatgcctattggcccaccttctgagcccacacacctggcagtggaagatgtgtctgacaccacagtgtccctgaagtggaggccacctgagagagttggagctggaggcctggatggctactctgtggaatactgcccagagggctgctctgagtgggttgcagctctgcagggactgacagagcacacctccatcctggtcaaggatctgcctacaggggctagactgctgttcagagttagggcccacaacatggctggaccaggggctcctgtgaccacaacagaacctgtgactgtgcaagaaatcctgcagaggcccagactgcagctgcctagacatctgagacagaccatccagaagaaagttggggagcctgtgaacctgctgatcccattccaaggcaagcccagacctcaagtgacctggaccaaagagggacagcccctggctggggaagaagtctccatcagaaacagccccactgacaccatcctgttcatcagagctgccagaagagtgcattctggcacctaccaagtgactgttaggattgagaacatggaagataaggctaccctggtgctgcaggttgtggataagcctagtcctcctcaggacctcagagtcactgatgcctggggactgaatgtggccctggaatggaagcctccacaggatgtgggcaacactgagctgtggggctatacagtgcagaaggcagataagaaaaccatggaatggttcacagtgctggaacactatagaaggacccactgtgtggtgccagagctgatcattggcaatggctactacttcagggtgttcagccagaatatggttggattctctgatagggcagccactaccaaagaaccagtgttcatccccagacctggcatcacctatgagccacctaactacaaggccctggatttctctgaggcccctagcttcacccagcctctggtcaatagaagtgtgattgcagggtacactgccatgctgtgctgtgcagtcagaggcagccccaagcctaagatctcctggttcaaaaatggactggaccttggggaagatgccagattcagaatgttcagcaagcaaggggtgctgaccctggaaatcagaaagccctgtccttttgatggtggcatctatgtgtgtagagccaccaacctccagggagaagctagatgtgaatgcaggctggaagttagagtgcctcagtgagcggccgccaataaaggatcgtttattttcattggaagcgtgtgttggttttttgatcaggcgcgtccaagcttgcatgctggggagagatctgcggccgcaggaacccctagtgatggagttggccactccctctctgcgcgctcgctcgctcactgaggccgcccgggcaaagcccgggcgtcgggcgacctttggtcgcccggcctcagtgagcgagcgagcgcgcagagagggagtggccaa

SEQ ID NO: 118 - DNA, 4950 bp, synthetic construct
  source 1..4950: mol_type = other DNA
ctgcgcgctcgctcgctcactgaggccgcccgggcaaagcccgggcgtcgggcgacctttggtcgcccggcctcagtgagcgagcgagcgcgcagagagggagtggccaactccatcactaggggttcctgcggccgcacgcgtctcagtccattaggagccagtagcctggaagatgtctttacccccagcatcagttcaagtggagcagcacataactcttgccctctgccttccaagattctggtgctgagacttatggagtgtcttggaggttgccttctgccccccaaccctgctcccagctggccctcccaggcctgggttgctggcctctgctttatcaggattctcaagagggacagctggtttatgttgcatgactgttccctgcatatctgctctggttttaaatagcttatctgagcagctggaggaccacatgggcttatatggcgtggggtacatgttcctgtagccttgtccctggcacctgccaaaatagcagccaacaccccccacccccaccgccatccccctgccccacccgtcccctgtcgcacattcctccctccgcagggctggctcaccaggccccagcccacatgcctgcttaaagccctctccatcctctgcctcacccagtccccgctgagactgagcagacgcctccaggatctgtcggcagggtttagtgaaccgtcagatcctgcagaagttggtcgtgaggcactagtgggcaggtaagtatcaaggttacaagacaggtttaaggagaccaatagaaactgggcttgtcgagacagagaagactcttgcgtttctgataggcacctattggtcttactgacatccactttgcctttctctccacaggtgtactagtccgccaccatgcctgagcctggcaagaaacctgtgtctgccttcagcaaaaagcccagatctgtggaagtggctgctggcagccctgctgtgtttgaggctgagactgagagagctggggtcaaagtcagatggcagagaggaggctctgacatctctgccagcaacaaatatggcctggccacagagggcaccagacacaccctgacagtcagagaagtgggccctgctgaccagggcagctatgctgtgattgctggctccagcaaagtgaagtttgacctgaaagtgattgaggcagagaaggctgagcccatgctggcaccagctccagcaccagctgaagctactggtgctcctggggaagctcctgctcctgctgctgaactgggagagtctgccccatctcctaagggctctagctctgctgccctgaatggccctacacctggggctccagatgaccccattggcctgtttgtgatgaggccccaggatggggaagtgacagttggaggcagcatcaccttttctgccagagtggctggggccagcctgctgaaacctcctgtggtcaagtggttcaaaggcaaatgggttgacctgtcctccaaagtgggccagcacctccagctgcatgacagctatgatagggccagcaaggtgtacctgtttgagctgcacatcacagatgcccagccagccttcacaggcagctacagatgtgaagtgtccaccaaggacaagtttgactgcagcaacttcaacctgacagtgcatgaggccatgggcacaggggaccttgatctgctgtcagccttcagaagaaccagcctggctggtggtggcagaagaatctctgacagccatgaggacacaggcatcctggacttcagctccctgctgaagaagagagacagcttcagaacccctagggacagcaagctggaagccccagctgaggaagatgtctgggagatcctgagacaggcccctccatctgagtatgagagaattgccttccagtatggggtcacagacctgagaggcatgctgaagagactgaagggcatgagaagagatgagaagaagtccacagccttccagaaaaagctggaacctgcctaccaggtgtccaagggccacaagatcagactgacagtggaactggctgaccatgatgctgaagtgaagtggctcaagaatggccaagagatccaaatgtctggcagcaagtacatctttgagagcattggagccaagaggaccctgaccatcagccagtgtagcctggcagatgatgcagcctatcagtgtgttgttggtggagagaagtgcagcacagagctgtttgtcaaagaacctccagtgctgatcaccaggcctctggaagatcagctggtcatggttggacagagggttgagtttgagtgtgaagtctctgaagagggtgcccaagtgaaatggctgaaagatggggttgagctgaccagagaggaaaccttcaagtacaggttcaagaaggatggccagaggcaccacctgatcatcaatgaagccatgctggaagatgctggccactatgccctgtgcaccagtggtggacaagccctggctgagctgattgtgcaagagaagaaactggaagtgtaccagagcattgctgacctgatggttggagctaaggaccaggctgtgttcaagtgtgaagtgtcagatgagaatgtcagaggagtgtggttgaagaatgggaaagaactggtgcctgactccaggatcaaggtgtcccacattggcagagtgcacaagctgacaattgatgatgtgacccctgctgatgaggctgactacagctttgtgcctgagggctttgcctgcaacctgtctgccaagctgcactttatggaagtcaagattgactttgtgcccaggcaagagcctccaaagatccacctggattgccctggcagaatcccagacaccattgtggttgtggctggcaacaagctgaggctggatgtgcccatctctggggaccctgctcctacagtgatttggcagaaggccatcacacagggcaacaaggcccctgctagacctgcacctgatgctccagaggacactggggactctgatgagtgggtgtttgacaagaaactgctgtgtgaaactgagggcagagtcagagtggaaaccacaaaggacagatccatcttcacagtggaaggggctgagaaagaggatgaaggggtctacacagtgacagtgaagaaccctgtgggagaagatcaagtgaacctgactgtgaaagtcattgatgtgcctgatgcaccagcagctcccaagatcagcaatgttggagaggacagctgcacagtgcagtgggagcctccagcctatgatggtggacagcctatcctgggctacatcctggaaagaaagaagaaaaagtcctacagatggatgaggctcaactttgatctgatccaagagctgagccatgaagctagaaggatgattgaaggggttgtgtatgagatgagagtgtatgcagtgaatgccattggcatgagcagaccctctccagcctctcagccctttatgcctattggcccaccttctgagcccacacacctggcagtggaagatgtgtctgacaccacagtgtccctgaagtggaggccacctgagagagttggagctggaggcctggatggctactctgtggaatactgcccagagggctgctctgagtgggttgcagctctgcagggactgacagagcacacctccatcctggtcaaggatctgcctacaggggctagactgctgttcagagttagggcccacaacatggctggaccaggggctcctgtgaccacaacagaacctgtgactgtgcaagaaatcctgcagaggcccagactgcagctgcctagacatctgagacagaccatccagaagaaagttggggagcctgtgaacctgctgatcccattccaaggcaagcccagacctcaagtgacctggaccaaagagggacagcccctggctggggaagaagtctccatcagaaacagccccactgacaccatcctgttcatcagagctgccagaagagtgcattctggcacctaccaagtgactgttaggattgagaacatggaagataaggctaccctggtgctgcaggttgtggataagcctagtcctcctcaggacctcagagtcactgatgcctggggactgaatgtggccctggaatggaagcctccacaggatgtgggcaacactgagctgtggggctatacagtgcagaaggcagataagaaaaccatggaatggttcacagtgctggaacactatagaaggacccactgtgtggtgccagagctgatcattggcaatggctactacttcagggtgttcagccagaatatggttggattctctgatagggcagccactaccaaagaaccagtgttcatccccagacctggcatcacctatgagccacctaactacaaggccctggatttctctgaggcccctagcttcacccagcctctggtcaatagaagtgtgattgcagggtacactgccatgctgtgctgtgcagtcagaggcagccccaagcctaagatctcctggttcaaaaatggactggaccttggggaagatgccagattcagaatgttcagcaagcaaggggtgctgaccctggaaatcagaaagccctgtccttttgatggtggcatctatgtgtgtagagccaccaacctccagggagaagctagatgtgaatgcaggctggaagttagagtgcctcagtgagcggccgccaataaaggatcgtttattttcattggaagcgtgtgttggttttttgatcaggcgcgtccaagcttgcatgctggggagagatctgcggccgcaggaacccctagtgatggagttggccactccctctctgcgcgctcgctcgctcactgaggccgcccgggcaaagcccgggcgtcgggcgacctttggtcgcccggcctcagtgagcgagcgagcgcgcag

SEQ ID NO: 119 - DNA, 4980 bp, synthetic construct
  source 1..4980: mol_type = other DNA
ttggccactccctctctgcgcgctcgctcgctcactgaggccgcccgggcaaagcccgggcgtcgggcgacctttggtcgcccggcctcagtgagcgagcgagcgcgcagagagggagtggccaactccatcactaggggttcctgcggccgcacgcgtctcagtccattaggagccagtagcctggaagatgtctttacccccagcatcagttcaagtggagcagcacataactcttgccctctgccttccaagattctggtgctgagacttatggagtgtcttggaggttgccttctgccccccaaccctgctcccagctggccctcccaggcctgggttgctggcctctgctttatcaggattctcaagagggacagctggtttatgttgcatgactgttccctgcatatctgctctggttttaaatagcttatctgagcagctggaggaccacatgggcttatatggcgtggggtacatgttcctgtagccttgtccctggcacctgccaaaatagcagccaacaccccccacccccaccgccatccccctgccccacccgtcccctgtcgcacattcctccctccgcagggctggctcaccaggccccagcccacatgcctgcttaaagccctctccatcctctgcctcacccagtccccgctgagactgagcagacgcctccaggatctgtcggcagggtttagtgaaccgtcagatcctgcagaagttggtcgtgaggcactagtgggcaggtaagtatcaaggttacaagacaggtttaaggagaccaatagaaactgggcttgtcgagacagagaagactcttgcgtttctgataggcacctattggtcttactgacatccactttgcctttctctccacaggtgtactagtccgccaccatgcctgagcctggcaagaaacctgtgtctgccttcagcaaaaagcccagatctgtggaagtggctgctggcagccctgctgtgtttgaggctgagactgagagagctggggtcaaagtcagatggcagagaggaggctctgacatctctgccagcaacaaatatggcctggccacagagggcaccagacacaccctgacagtcagagaagtgggccctgctgaccagggcagctatgctgtgattgctggctccagcaaagtgaagtttgacctgaaagtgattgaggcagagaaggctgagcccatgctggcaccagctccagcaccagctgaagctactggtgctcctggggaagctcctgctcctgctgctgaactgggagagtctgccccatctcctaagggctctagctctgctgccctgaatggccctacacctggggctccagatgaccccattggcctgtttgtgatgaggccccaggatggggaagtgacagttggaggcagcatcaccttttctgccagagtggctggggccagcctgctgaaacctcctgtggtcaagtggttcaaaggcaaatgggttgacctgtcctccaaagtgggccagcacctccagctgcatgacagctatgatagggccagcaaggtgtacctgtttgagctgcacatcacagatgcccagccagccttcacaggcagctacagatgtgaagtgtccaccaaggacaagtttgactgcagcaacttcaacctgacagtgcatgaggccatgggcacaggggaccttgatctgctgtcagccttcagaagaaccagcctggctggtggtggcagaagaatctctgacagccatgaggacacaggcatcctggacttcagctccctgctgaagaagagagacagcttcagaacccctagggacagcaagctggaagccccagctgaggaagatgtctgggagatcctgagacaggcccctccatctgagtatgagagaattgccttccagtatggggtcacagacctgagaggcatgctgaagagactgaagggcatgagaagagatgagaagaagtccacagccttccagaaaaagctggaacctgcctaccaggtgtccaagggccacaagatcagactgacagtggaactggctgaccatgatgctgaagtgaagtggctcaagaatggccaagagatccaaatgtctggcagcaagtacatctttgagagcattggagccaagaggaccctgaccatcagccagtgtagcctggcagatgatgcagcctatcagtgtgttgttggtggagagaagtgcagcacagagctgtttgtcaaagaacctccagtgctgatcaccaggcctctggaagatcagctggtcatggttggacagagggttgagtttgagtgtgaagtctctgaagagggtgcccaagtgaaatggctgaaagatggggttgagctgaccagagaggaaaccttcaagtacaggttcaagaaggatggccagaggcaccacctgatcatcaatgaagccatgctggaagatgctggccactatgccctgtgcaccagtggtggacaagccctggctgagctgattgtgcaagagaagaaactggaagtgtaccagagcattgctgacctgatggttggagctaaggaccaggctgtgttcaagtgtgaagtgtcagatgagaatgtcagaggagtgtggttgaagaatgggaaagaactggtgcctgactccaggatcaaggtgtcccacattggcagagtgcacaagctgacaattgatgatgtgacccctgctgatgaggctgactacagctttgtgcctgagggctttgcctgcaacctgtctgccaagctgcactttatggaagtcaagattgactttgtgcccaggcaagagcctccaaagatccacctggattgccctggcagaatcccagacaccattgtggttgtggctggcaacaagctgaggctggatgtgcccatctctggggaccctgctcctacagtgatttggcagaaggccatcacacagggcaacaaggcccctgctagacctgcacctgatgctccagaggacactggggactctgatgagtgggtgtttgacaagaaactgctgtgtgaaactgagggcagagtcagagtggaaaccacaaaggacagatccatcttcacagtggaaggggctgagaaagaggatgaaggggtctacacagtgacagtgaagaaccctgtgggagaagatcaagtgaacctgactgtgaaagtcattgatgtgcctgatgcaccagcagctcccaagatcagcaatgttggagaggacagctgcacagtgcagtgggagcctccagcctatgatggtggacagcctatcctgggctacatcctggaaagaaagaagaaaaagtcctacagatggatgaggctcaactttgatctgatccaagagctgagccatgaagctagaaggatgattgaaggggttgtgtatgagatgagagtgtatgcagtgaatgccattggcatgagcagaccctctccagcctctcagccctttatgcctattggcccaccttctgagcccacacacctggcagtggaagatgtgtctgacaccacagtgtccctgaagtggaggccacctgagagagttggagctggaggcctggatggctactctgtggaatactgcccagagggctgctctgagtgggttgcagctctgcagggactgacagagcacacctccatcctggtcaaggatctgcctacaggggctagactgctgttcagagttagggcccacaacatggctggaccaggggctcctgtgaccacaacagaacctgtgactgtgcaagaaatcctgcagaggcccagactgcagctgcctagacatctgagacagaccatccagaagaaagttggggagcctgtgaacctgctgatcccattccaaggcaagcccagacctcaagtgacctggaccaaagagggacagcccctggctggggaagaagtctccatcagaaacagccccactgacaccatcctgttcatcagagctgccagaagagtgcattctggcacctaccaagtgactgttaggattgagaacatggaagataaggctaccctggtgctgcaggttgtggataagcctagtcctcctcaggacctcagagtcactgatgcctggggactgaatgtggccctggaatggaagcctccacaggatgtgggcaacactgagctgtggggctatacagtgcagaaggcagataagaaaaccatggaatggttcacagtgctggaacactatagaaggacccactgtgtggtgccagagctgatcattggcaatggctactacttcagggtgttcagccagaatatggttggattctctgatagggcagccactaccaaagaaccagtgttcatccccagacctggcatcacctatgagccacctaactacaaggccctggatttctctgaggcccctagcttcacccagcctctggtcaatagaagtgtgattgcagggtacactgccatgctgtgctgtgcagtcagaggcagccccaagcctaagatctcctggttcaaaaatggactggaccttggggaagatgccagattcagaatgttcagcaagcaaggggtgctgaccctggaaatcagaaagccctgtccttttgatggtggcatctatgtgtgtagagccaccaacctccagggagaagctagatgtgaatgcaggctggaagttagagtgcctcagtgagcggccgccaataaaggatcgtttattttcattggaagcgtgtgttggttttttgatcaggcgcgtccaagcttgcatgctggggagagatctgcggccgcaggaacccctagtgatggagttggccactccctctctgcgcgctcgctcgctcactgaggccgcccgggcaaagcccgggcgtcgggcgacctttggtcgcccggcctcagtgagcgagcgagcgcgcagagagggagtggccaa

SEQ ID NO: 120 - DNA, 4950 bp, synthetic construct
  source 1..4950: mol_type = other DNA
ctgcgcgctcgctcgctcactgaggccgggcgaccaaaggtcgcccgacgcccgggctttgcccgggcggcctcagtgagcgagcgagcgcgcagagagggagtggccaactccatcactaggggttcctgcggccgcacgcgtctcagtccattaggagccagtagcctggaagatgtctttacccccagcatcagttcaagtggagcagcacataactcttgccctctgccttccaagattctggtgctgagacttatggagtgtcttggaggttgccttctgccccccaaccctgctcccagctggccctcccaggcctgggttgctggcctctgctttatcaggattctcaagagggacagctggtttatgttgcatgactgttccctgcatatctgctctggttttaaatagcttatctgagcagctggaggaccacatgggcttatatggcgtggggtacatgttcctgtagccttgtccctggcacctgccaaaatagcagccaacaccccccacccccaccgccatccccctgccccacccgtcccctgtcgcacattcctccctccgcagggctggctcaccaggccccagcccacatgcctgcttaaagccctctccatcctctgcctcacccagtccccgctgagactgagcagacgcctccaggatctgtcggcagggtttagtgaaccgtcagatcctgcagaagttggtcgtgaggcactagtgggcaggtaagtatcaaggttacaagacaggtttaaggagaccaatagaaactgggcttgtcgagacagagaagactcttgcgtttctgataggcacctattggtcttactgacatccactttgcctttctctccacaggtgtactagtccgccaccatgcctgagcctggcaagaaacctgtgtctgccttcagcaaaaagcccagatctgtggaagtggctgctggcagccctgctgtgtttgaggctgagactgagagagctggggtcaaagtcagatggcagagaggaggctctgacatctctgccagcaacaaatatggcctggccacagagggcaccagacacaccctgacagtcagagaagtgggccctgctgaccagggcagctatgctgtgattgctggctccagcaaagtgaagtttgacctgaaagtgattgaggcagagaaggctgagcccatgctggcaccagctccagcaccagctgaagctactggtgctcctggggaagctcctgctcctgctgctgaactgggagagtctgccccatctcctaagggctctagctctgctgccctgaatggccctacacctggggctccagatgaccccattggcctgtttgtgatgaggccccaggatggggaagtgacagttggaggcagcatcaccttttctgccagagtggctggggccagcctgctgaaacctcctgtggtcaagtggttcaaaggcaaatgggttgacctgtcctccaaagtgggccagcacctccagctgcatgacagctatgatagggccagcaaggtgtacctgtttgagctgcacatcacagatgcccagccagccttcacaggcagctacagatgtgaagtgtccaccaaggacaagtttgactgcagcaacttcaacctgacagtgcatgaggccatgggcacaggggaccttgatctgctgtcagccttcagaagaaccagcctggctggtggtggcagaagaatctctgacagccatgaggacacaggcatcctggacttcagctccctgctgaagaagagagacagcttcagaacccctagggacagcaagctggaagccccagctgaggaagatgtctgggagatcctgagacaggcccctccatctgagtatgagagaattgccttccagtatggggtcacagacctgagaggcatgctgaagagactgaagggcatgagaagagatgagaagaagtccacagccttccagaaaaagctggaacctgcctaccaggtgtccaagggccacaagatcagactgacagtggaactggctgaccatgatgctgaagtgaagtggctcaagaatggccaagagatccaaatgtctggcagcaagtacatctttgagagcattggagccaagaggaccctgaccatcagccagtgtagcctggcagatgatgcagcctatcagtgtgttgttggtggagagaagtgcagcacagagctgtttgtcaaagaacctccagtgctgatcaccaggcctctggaagatcagctggtcatggttggacagagggttgagtttgagtgtgaagtctctgaagagggtgcccaagtgaaatggctgaaagatggggttgagctgaccagagaggaaaccttcaagtacaggttcaagaaggatggccagaggcaccacctgatcatcaatgaagccatgctggaagatgctggccactatgccctgtgcaccagtggtggacaagccctggctgagctgattgtgcaagagaagaaactggaagtgtaccagagcattgctgacctgatggttggagctaaggaccaggctgtgttcaagtgtgaagtgtcagatgagaatgtcagaggagtgtggttgaagaatgggaaagaactggtgcctgactccaggatcaaggtgtcccacattggcagagtgcacaagctgacaattgatgatgtgacccctgctgatgaggctgactacagctttgtgcctgagggctttgcctgcaacctgtctgccaagctgcactttatggaagtcaagattgactttgtgcccaggcaagagcctccaaagatccacctggattgccctggcagaatcccagacaccattgtggttgtggctggcaacaagctgaggctggatgtgcccatctctggggaccctgctcctacagtgatttggcagaaggccatcacacagggcaacaaggcccctgctagacctgcacctgatgctccagaggacactggggactctgatgagtgggtgtttgacaagaaactgctgtgtgaaactgagggcagagtcagagtggaaaccacaaaggacagatccatcttcacagtggaaggggctgagaaagaggatgaaggggtctacacagtgacagtgaagaaccctgtgggagaagatcaagtgaacctgactgtgaaagtcattgatgtgcctgatgcaccagcagctcccaagatcagcaatgttggagaggacagctgcacagtgcagtgggagcctccagcctatgatggtggacagcctatcctgggctacatcctggaaagaaagaagaaaaagtcctacagatggatgaggctcaactttgatctgatccaagagctgagccatgaagctagaaggatgattgaaggggttgtgtatgagatgagagtgtatgcagtgaatgccattggcatgagcagaccctctccagcctctcagccctttatgcctattggcccaccttctgagcccacacacctggcagtggaagatgtgtctgacaccacagtgtccctgaagtggaggccacctgagagagttggagctggaggcctggatggctactctgtggaatactgcccagagggctgctctgagtgggttgcagctctgcagggactgacagagcacacctccatcctggtcaaggatctgcctacaggggctagactgctgttcagagttagggcccacaacatggctggaccaggggctcctgtgaccacaacagaacctgtgactgtgcaagaaatcctgcagaggcccagactgcagctgcctagacatctgagacagaccatccagaagaaagttggggagcctgtgaacctgctgatcccattccaaggcaagcccagacctcaagtgacctggaccaaagagggacagcccctggctggggaagaagtctccatcagaaacagccccactgacaccatcctgttcatcagagctgccagaagagtgcattctggcacctaccaagtgactgttaggattgagaacatggaagataaggctaccctggtgctgcaggttgtggataagcctagtcctcctcaggacctcagagtcactgatgcctggggactgaatgtggccctggaatggaagcctccacaggatgtgggcaacactgagctgtggggctatacagtgcagaaggcagataagaaaaccatggaatggttcacagtgctggaacactatagaaggacccactgtgtggtgccagagctgatcattggcaatggctactacttcagggtgttcagccagaatatggttggattctctgatagggcagccactaccaaagaaccagtgttcatccccagacctggcatcacctatgagccacctaactacaaggccctggatttctctgaggcccctagcttcacccagcctctggtcaatagaagtgtgattgcagggtacactgccatgctgtgctgtgcagtcagaggcagccccaagcctaagatctcctggttcaaaaatggactggaccttggggaagatgccagattcagaatgttcagcaagcaaggggtgctgaccctggaaatcagaaagccctgtccttttgatggtggcatctatgtgtgtagagccaccaacctccagggagaagctagatgtgaatgcaggctggaagttagagtgcctcagtgagcggccgccaataaaggatcgtttattttcattggaagcgtgtgttggttttttgatcaggcgcgtccaagcttgcatgctggggagagatctgcggccgcaggaacccctagtgatggagttggccactccctctctgcgcgctcgctcgctcactgaggccgggcgaccaaaggtcgcccgacgcccgggctttgcccgggcggcctcagtgagcgagcgagcgcgcag

SEQ ID NO: 121 - DNA, 4980 bp, synthetic construct
  source 1..4980: mol_type = other DNA
ttggccactccctctctgcgcgctcgctcgctcactgaggccgggcgaccaaaggtcgcccgacgcccgggctttgcccgggcggcctcagtgagcgagcgagcgcgcagagagggagtggccaactccatcactaggggttcctgcggccgcacgcgtctcagtccattaggagccagtagcctggaagatgtctttacccccagcatcagttcaagtggagcagcacataactcttgccctctgccttccaagattctggtgctgagacttatggagtgtcttggaggttgccttctgccccccaaccctgctcccagctggccctcccaggcctgggttgctggcctctgctttatcaggattctcaagagggacagctggtttatgttgcatgactgttccctgcatatctgctctggttttaaatagcttatctgagcagctggaggaccacatgggcttatatggcgtggggtacatgttcctgtagccttgtccctggcacctgccaaaatagcagccaacaccccccacccccaccgccatccccctgccccacccgtcccctgtcgcacattcctccctccgcagggctggctcaccaggccccagcccacatgcctgcttaaagccctctccatcctctgcctcacccagtccccgctgagactgagcagacgcctccaggatctgtcggcagggtttagtgaaccgtcagatcctgcagaagttggtcgtgaggcactagtgggcaggtaagtatcaaggttacaagacaggtttaaggagaccaatagaaactgggcttgtcgagacagagaagactcttgcgtttctgataggcacctattggtcttactgacatccactttgcctttctctccacaggtgtactagtccgccaccatgcctgagcctggcaagaaacctgtgtctgccttcagcaaaaagcccagatctgtggaagtggctgctggcagccctgctgtgtttgaggctgagactgagagagctggggtcaaagtcagatggcagagaggaggctctgacatctctgccagcaacaaatatggcctggccacagagggcaccagacacaccctgacagtcagagaagtgggccctgctgaccagggcagctatgctgtgattgctggctccagcaaagtgaagtttgacctgaaagtgattgaggcagagaaggctgagcccatgctggcaccagctccagcaccagctgaagctactggtgctcctggggaagctcctgctcctgctgctgaactgggagagtctgccccatctcctaagggctctagctctgctgccctgaatggccctacacctggggctccagatgaccccattggcctgtttgtgatgaggccccaggatggggaagtgacagttggaggcagcatcaccttttctgccagagtggctggggccagcctgctgaaacctcctgtggtcaagtggttcaaaggcaaatgggttgacctgtcctccaaagtgggccagcacctccagctgcatgacagctatgatagggccagcaaggtgtacctgtttgagctgcacatcacagatgcccagccagccttcacaggcagctacagatgtgaagtgtccaccaaggacaagtttgactgcagcaacttcaacctgacagtgcatgaggccatgggcacaggggaccttgatctgctgtcagccttcagaagaaccagcctggctggtggtggcagaagaatctctgacagccatgaggacacaggcatcctggacttcagctccctgctgaagaagagagacagcttcagaacccctagggacagcaagctggaagccccagctgaggaagatgtctgggagatcctgagacaggcccctccatctgagtatgagagaattgccttccagtatggggtcacagacctgagaggcatgctgaagagactgaagggcatgagaagagatgagaagaagtccacagccttccagaaaaagctggaacctgcctaccaggtgtccaagggccacaagatcagactgacagtggaactggctgaccatgatgctgaagtgaagtggctcaagaatggccaagagatccaaatgtctggcagcaagtacatctttgagagcattggagccaagaggaccctgaccatcagccagtgtagcctggcagatgatgcagcctatcagtgtgttgttggtggagagaagtgcagcacagagctgtttgtcaaagaacctccagtgctgatcaccaggcctctggaagatcagctggtcatggttggacagagggttgagtttgagtgtgaagtctctgaagagggtgcccaagtgaaatggctgaaagatggggttgagctgaccagagaggaaaccttcaagtacaggttcaagaaggatggccagaggcaccacctgatcatcaatgaagccatgctggaagatgctggccactatgccctgtgcaccagtggtggacaagccctggctgagctgattgtgcaagagaagaaactggaagtgtaccagagcattgctgacctgatggttggagctaaggaccaggctgtgttcaagtgtgaagtgtcagatgagaatgtcagaggagtgtggttgaagaatgggaaagaactggtgcctgactccaggatcaaggtgtcccacattggcagagtgcacaagctgacaattgatgatgtgacccctgctgatgaggctgactacagctttgtgcctgagggctttgcctgcaacctgtctgccaagctgcactttatggaagtcaagattgactttgtgcccaggcaagagcctccaaagatccacctggattgccctggcagaatcccagacaccattgtggttgtggctggcaacaagctgaggctggatgtgcccatctctggggaccctgctcctacagtgatttggcagaaggccatcacacagggcaacaaggcccctgctagacctgcacctgatgctccagaggacactggggactctgatgagtgggtgtttgacaagaaactgctgtgtgaaactgagggcagagtcagagtggaaaccacaaaggacagatccatcttcacagtggaaggggctgagaaagaggatgaaggggtctacacagtgacagtgaagaaccctgtgggagaagatcaagtgaacctgactgtgaaagtcattgatgtgcctgatgcaccagcagctcccaagatcagcaatgttggagaggacagctgcacagtgcagtgggagcctccagcctatgatggtggacagcctatcctgggctacatcctggaaagaaagaagaaaaagtcctacagatggatgaggctcaactttgatctgatccaagagctgagccatgaagctagaaggatgattgaaggggttgtgtatgagatgagagtgtatgcagtgaatgccattggcatgagcagaccctctccagcctctcagccctttatgcctattggcccaccttctgagcccacacacctggcagtggaagatgtgtctgacaccacagtgtccctgaagtggaggccacctgagagagttggagctggaggcctggatggctactctgtggaatactgcccagagggctgctctgagtgggttgcagctctgcagggactgacagagcacacctccatcctggtcaaggatctgcctacaggggctagactgctgttcagagttagggcccacaacatggctggaccaggggctcctgtgaccacaacagaacctgtgactgtgcaagaaatcctgcagaggcccagactgcagctgcctagacatctgagacagaccatccagaagaaagttggggagcctgtgaacctgctgatcccattccaaggcaagcccagacctcaagtgacctggaccaaagagggacagcccctggctggggaagaagtctccatcagaaacagccccactgacaccatcctgttcatcagagctgccagaagagtgcattctggcacctaccaagtgactgttaggattgagaacatggaagataaggctaccctggtgctgcaggttgtggataagcctagtcctcctcaggacctcagagtcactgatgcctggggactgaatgtggccctggaatggaagcctccacaggatgtgggcaacactgagctgtggggctatacagtgcagaaggcagataagaaaaccatggaatggttcacagtgctggaacactatagaaggacccactgtgtggtgccagagctgatcattggcaatggctactacttcagggtgttcagccagaatatggttggattctctgatagggcagccactaccaaagaaccagtgttcatccccagacctggcatcacctatgagccacctaactacaaggccctggatttctctgaggcccctagcttcacccagcctctggtcaatagaagtgtgattgcagggtacactgccatgctgtgctgtgcagtcagaggcagccccaagcctaagatctcctggttcaaaaatggactggaccttggggaagatgccagattcagaatgttcagcaagcaaggggtgctgaccctggaaatcagaaagccctgtccttttgatggtggcatctatgtgtgtagagccaccaacctccagggagaagctagatgtgaatgcaggctggaagttagagtgcctcagtgagcggccgccaataaaggatcgtttattttcattggaagcgtgtgttggttttttgatcaggcgcgtccaagcttgcatgctggggagagatctgcggccgcaggaacccctagtgatggagttggccactccctctctgcgcgctcgctcgctcactgaggccgggcgaccaaaggtcgcccgacgcccgggctttgcccgggcggcctcagtgagcgagcgagcgcgcagagagggagtggccaa

SEQ ID NO: 122 - DNA, 5074 bp, synthetic construct
  source 1..5074: mol_type = other DNA
ctgcgcgctcgctcgctcactgaggccgggcgaccaaaggtcgcccgacgcccgggctttgcccgggcggcctcagtgagcgagcgagcgcgcagagagggagtggccaactccatcactaggggttcctgcggccgcacgcgtctggaagatgtctttacccccagcatcagttcaagtggagcagcacataactcttgccctctgccttccaagattctggtgctgagacttatggagtgtcttggaggttgccttctgccccccaaccctgctcccagctggccctcccaggcctgggttgctggcctctgctttatcaggattctcaagagggacagctggtttatgttgcatgactgttccctgcatatctgctctggttttaaatagcttatctgagcagctggaggaccacatgggcttatatggcgtggggtacatgttcctgtagccttgtccctggcacctgccaaaatagcagccaacaccccccacccccaccgccatccccctgccccacccgtcccctgtcgcacattcctccctccgcagggctggctcaccaggccccagcccacatgcctgcttaaagccctctccatcctctgcctcacccagtccccgctgagactgagcagacgcctccaggatctgtcggcagctgctgttctgaggtaagtactagcagctacaatccagctaccattctgcttttattttatggttgggataaggctggattattctgagtccaagctaggcccttttgctaatcatgttcatacctcttatcttcctcccacagctcctgggcaacgtgctggtctgtgtgctggcccatcactttggcaaagaattgcgatcgccaccatgcctgagccggggaagtaagccagtctcagctttagcaagaagccacggtcagtggaagtggccgcaggcagccctgccgtgttcgaggccgagacagagcgggcaggagtgaaggtgcgctggcagcgcggaggcagtgacatcagcgccagcaacaagtacggcctggccacagagggcacacggcatacgctgacagtgcgggaagtgggccctgccgaccagggatcttacgcagtcattgctggctcctccaaggtcaagttcgacctcaaggtcatagaggcagagaaggcagagcccatgctggcccctgcccctgcccctgctgaggccactggagcccctggagaagccccggccccagccgctgagctgggagaaagtgccccaagtcccaaagggtcaagctcagcagctctcaatggtcctacccctggagcccccgatgaccccattggcctcttcgtgatgcggccacaggatggcgaggtgaccgtgggtggcagcatcaccttctcagcccgcgtggccggcgccagcctcctgaagccgcctgtggtcaagtggttcaagggcaaatgggtggacctgagcagcaaggtgggccagcacctgcagctgcacgacagctacgaccgcgccagcaaggtctatctgttcgagctgcacatcaccgatgcccagcctgccttcactggcagctaccgctgtgaggtgtccaccaaggacaaatttgactgctccaacttcaatctcactgtccacgaggccatgggcaccggagacctggacctcctatcagccttccgccgcacgagcctggctggaggtggtcggcggatcagtgatagccatgaggacactgggattctggacttcagctcactgctgaaaaagagagacagtttccggaccccgagggactcgaagctggaggcaccagcagaggaggacgtgtgggagatcctacggcaggcacccccatctgagtacgagcgcatcgccttccagtacggcgtcactgacctgcgcggcatgctaaagaggctcaagggcatgaggcgcgatgagaagaagagcacagcctttcagaagaagctggagccggcctaccaggtgagcaaaggccacaagatccggctgaccgtggaactggctgaccatgacgctgaggtcaaatggctcaagaatggccaggagatccagatgagcggcagcaagtacatctttgagtccatcggtgccaagcgtaccctgaccatcagccagtgctcattggcggacgacgcagcctaccagtgcgtggtgggtggcgagaagtgtagcacggagctctttgtgaaagagccccctgtgctcatcacgcgccccttggaggaccagctggtgatggtggggcagcgggtggagtttgagtgtgaagtatcggaggagggggcgcaagtcaaatggctgaaggacggggtggagctgacccgggaggagaccttcaaataccggttcaagaaggacgggcagagacaccacctgatcatcaacgaggccatgctggaggacgcggggcactatgcactgtgcactagcgggggccaggcgctggctgagctcattgtgcaggaaaagaagctggaggtgtaccagagcatcgcagacctgatggtgggcgcaaaggaccaggcggtgttcaaatgtgaggtctcagatgagaatgttcggggtgtgtggctgaagaatgggaaggagctggtgcccgacagccgcataaaggtgtcccacatcgggcgggtccacaaactgaccattgacgacgtcacacctgccgacgaggctgactacagctttgtgcccgagggcttcgcctgcaacctgtcagccaagctccacttcatggaggtcaagattgacttcgtacccaggcaggaacctcccaagatccacctggactgcccaggccgcataccagacaccattgtggttgtagctggaaataagctacgtctggacgtccctatctctggggaccctgctcccactgtgatctggcagaaggctatcacgcaggggaataaggccccagccaggccagccccagatgccccagaggacacaggtgacagcgatgagtgggtgtttgacaagaagctgctgtgtgagaccgagggccgggtccgcgtggagaccaccaaggaccgcagcatcttcacggtcgagggggcagagaaggaagatgagggcgtctacacggtcacagtgaagaaccctgtgggcgaggaccaggtcaacctcacagtcaaggtcatcgacgtgccagacgcacctgcggcccccaagatcagcaacgtgggagaggactcctgcacagtacagtgggagccgcctgcctacgatggcgggcagcccatcctgggctacatcctggagcgcaagaagaagaagagctaccggtggatgcggctgaacttcgacctgattcaggagctgagtcatgaagcgcggcgcatgatcgagggcgtggtgtacgagatgcgcgtctacgcggtcaacgccatcggcatgtccaggcccagccctgcctcccagcccttcatgcctatcggtccccccagcgaacccacccacctggcagtagaggacgtctctgacaccacggtctccctcaagtggcggcccccagagcgcgtgggagcaggaggcctggatggctacagcgtggagtactgcccagagggctgctcagagtgggtggctgccctgcaggggctgacagagcacacatcgatactggtgaaggacctgcccacgggggcccggctgcttttccgagtgcgggcacacaatatggcagggcctggagcccctgttaccaccacggagccggtgacagtgcaggagatcctgcaacggccacggcttcagctgcccaggcacctgcgccagaccattcagaagaaggtcggggagcctgtgaaccttctcatccctttccagggcaagccccggcctcaggtgacctggaccaaagaggggcagcccctggcaggcgaggaggtgagcatccgcaacagccccacagacaccatcctgttcatccgggccgctcgccgcgtgcattcaggcacttaccaggtgacggtgcgcattgagaacatggaggacaaggccacgctggtgctgcaggttgttgacaagccaagtcctccccaggatctccgggtgactgacgcctggggtcttaatgtggctctggagtggaagccaccccaggatgtcggcaacacggagctctgggggtacacagtgcagaaagccgacaagaagaccatggagtggttcaccgtcttggagcattaccgccgcacccactgcgtggtgccagagctcatcattggcaatggctactacttccgcgtcttcagccagaatatggttggctttagtgacagagcggccaccaccaaggagcccgtctttatccccagaccaggcatcacctatgagccacccaactataaggccctggacttctccgaggccccaagcttcacccagcccctggtgaaccgctcggtcatcgcgggctacactgctatgctctgctgtgctgtccggggtagccccaagcccaagatttcctggttcaagaatggcctggacctgggagaagacgcccgcttccgcatgttcagcaagcagggagtgttgactctggagattagaaagccctgcccctttgacgggggcatctatgtctgcagggccaccaacttacagggcgaggcacggtgtgagtgccgcctggaggtgcgagtgcctcagtgacctcgagctgtgccttctagttgccagccatctgttgtttgcccctcccccgtgccttccttgaccctggaaggtgccactcccactgtcctttcctaataaaatgaggaaattgcatcgcattgtctgagtaggtgtcattctattctggggggtggggtggggcaggacagcaagggggaggattgggaagacaatagcaggcatgctggggatgcggtgggctctatggaccggtgcggccgcaggaacccctagtgatggagttggccactccctctctgcgcgctcgctcgctcactgaggccgcccgggcaaagcccgggcgtcgggcgacctttggtcgcccggcctcagtgagcgagcgagcgcgcag

SEQ ID NO: 123 - DNA, 5104 bp, synthetic construct
  source 1..5104: mol_type = other DNA
ttggccactccctctctgcgcgctcgctcgctcactgaggccgggcgaccaaaggtcgcccgacgcccgggctttgcccgggcggcctcagtgagcgagcgagcgcgcagagagggagtggccaactccatcactaggggttcctgcggccgcacgcgtctggaagatgtctttacccccagcatcagttcaagtggagcagcacataactcttgccctctgccttccaagattctggtgctgagacttatggagtgtcttggaggttgccttctgccccccaaccctgctcccagctggccctcccaggcctgggttgctggcctctgctttatcaggattctcaagagggacagctggtttatgttgcatgactgttccctgcatatctgctctggttttaaatagcttatctgagcagctggaggaccacatgggcttatatggcgtggggtacatgttcctgtagccttgtccctggcacctgccaaaatagcagccaacaccccccacccccaccgccatccccctgccccacccgtcccctgtcgcacattcctccctccgcagggctggctcaccaggccccagcccacatgcctgcttaaagccctctccatcctctgcctcacccagtccccgctgagactgagcagacgcctccaggatctgtcggcagctgctgttctgaggtaagtactagcagctacaatccagctaccattctgcttttattttatggttgggataaggctggattattctgagtccaagctaggcccttttgctaatcatgttcatacctcttatcttcctcccacagctcctgggcaacgtgctggtctgtgtgctggcccatcactttggcaaagaattgcgatcgccaccatgcctgagccggggaagtaagccagtctcagctttagcaagaagccacggtcagtggaagtggccgcaggcagccctgccgtgttcgaggccgagacagagcgggcaggagtgaaggtgcgctggcagcgcggaggcagtgacatcagcgccagcaacaagtacggcctggccacagagggcacacggcatacgctgacagtgcgggaagtgggccctgccgaccagggatcttacgcagtcattgctggctcctccaaggtcaagttcgacctcaaggtcatagaggcagagaaggcagagcccatgctggcccctgcccctgcccctgctgaggccactggagcccctggagaagccccggccccagccgctgagctgggagaaagtgccccaagtcccaaagggtcaagctcagcagctctcaatggtcctacccctggagcccccgatgaccccattggcctcttcgtgatgcggccacaggatggcgaggtgaccgtgggtggcagcatcaccttctcagcccgcgtggccggcgccagcctcctgaagccgcctgtggtcaagtggttcaagggcaaatgggtggacctgagcagcaaggtgggccagcacctgcagctgcacgacagctacgaccgcgccagcaaggtctatctgttcgagctgcacatcaccgatgcccagcctgccttcactggcagctaccgctgtgaggtgtccaccaaggacaaatttgactgctccaacttcaatctcactgtccacgaggccatgggcaccggagacctggacctcctatcagccttccgccgcacgagcctggctggaggtggtcggcggatcagtgatagccatgaggacactgggattctggacttcagctcactgctgaaaaagagagacagtttccggaccccgagggactcgaagctggaggcaccagcagaggaggacgtgtgggagatcctacggcaggcacccccatctgagtacgagcgcatcgccttccagtacggcgtcactgacctgcgcggcatgctaaagaggctcaagggcatgaggcgcgatgagaagaagagcacagcctttcagaagaagctggagccggcctaccaggtgagcaaaggccacaagatccggctgaccgtggaactggctgaccatgacgctgaggtcaaatggctcaagaatggccaggagatccagatgagcggcagcaagtacatctttgagtccatcggtgccaagcgtaccctgaccatcagccagtgctcattggcggacgacgcagcctaccagtgcgtggtgggtggcgagaagtgtagcacggagctctttgtgaaagagccccctgtgctcatcacgcgccccttggaggaccagctggtgatggtggggcagcgggtggagtttgagtgtgaagtatcggaggagggggcgcaagtcaaatggctgaaggacggggtggagctgacccgggaggagaccttcaaataccggttcaagaaggacgggcagagacaccacctgatcatcaacgaggccatgctggaggacgcggggcactatgcactgtgcactagcgggggccaggcgctggctgagctcattgtgcaggaaaagaagctggaggtgtaccagagcatcgcagacctgatggtgggcgcaaaggaccaggcggtgttcaaatgtgaggtctcagatgagaatgttcggggtgtgtggctgaagaatgggaaggagctggtgcccgacagccgcataaaggtgtcccacatcgggcgggtccacaaactgaccattgacgacgtcacacctgccgacgaggctgactacagctttgtgcccgagggcttcgcctgcaacctgtcagccaagctccacttcatggaggtcaagattgacttcgtacccaggcaggaacctcccaagatccacctggactgcccaggccgcataccagacaccattgtggttgtagctggaaataagctacgtctggacgtccctatctctggggaccctgctcccactgtgatctggcagaaggctatcacgcaggggaataaggccccagccaggccagccccagatgccccagaggacacaggtgacagcgatgagtgggtgtttgacaagaagctgctgtgtgagaccgagggccgggtccgcgtggagaccaccaaggaccgcagcatcttcacggtcgagggggcagagaaggaagatgagggcgtctacacggtcacagtgaagaaccctgtgggcgaggaccaggtcaacctcacagtcaaggtcatcgacgtgccagacgcacctgcggcccccaagatcagcaacgtgggagaggactcctgcacagtacagtgggagccgcctgcctacgatggcgggcagcccatcctgggctacatcctggagcgcaagaagaagaagagctaccggtggatgcggctgaacttcgacctgattcaggagctgagtcatgaagcgcggcgcatgatcgagggcgtggtgtacgagatgcgcgtctacgcggtcaacgccatcggcatgtccaggcccagccctgcctcccagcccttcatgcctatcggtccccccagcgaacccacccacctggcagtagaggacgtctctgacaccacggtctccctcaagtggcggcccccagagcgcgtgggagcaggaggcctggatggctacagcgtggagtactgcccagagggctgctcagagtgggtggctgccctgcaggggctgacagagcacacatcgatactggtgaaggacctgcccacgggggcccggctgcttttccgagtgcgggcacacaatatggcagggcctggagcccctgttaccaccacggagccggtgacagtgcaggagatcctgcaacggccacggcttcagctgcccaggcacctgcgccagaccattcagaagaaggtcggggagcctgtgaaccttctcatccctttccagggcaagccccggcctcaggtgacctggaccaaagaggggcagcccctggcaggcgaggaggtgagcatccgcaacagccccacagacaccatcctgttcatccgggccgctcgccgcgtgcattcaggcacttaccaggtgacggtgcgcattgagaacatggaggacaaggccacgctggtgctgcaggttgttgacaagccaagtcctccccaggatctccgggtgactgacgcctggggtcttaatgtggctctggagtggaagccaccccaggatgtcggcaacacggagctctgggggtacacagtgcagaaagccgacaagaagaccatggagtggttcaccgtcttggagcattaccgccgcacccactgcgtggtgccagagctcatcattggcaatggctactacttccgcgtcttcagccagaatatggttggctttagtgacagagcggccaccaccaaggagcccgtctttatccccagaccaggcatcacctatgagccacccaactataaggccctggacttctccgaggccccaagcttcacccagcccctggtgaaccgctcggtcatcgcgggctacactgctatgctctgctgtgctgtccggggtagccccaagcccaagatttcctggttcaagaatggcctggacctgggagaagacgcccgcttccgcatgttcagcaagcagggagtgttgactctggagattagaaagccctgcccctttgacgggggcatctatgtctgcagggccaccaacttacagggcgaggcacggtgtgagtgccgcctggaggtgcgagtgcctcagtgacctcgagctgtgccttctagttgccagccatctgttgtttgcccctcccccgtgccttccttgaccctggaaggtgccactcccactgtcctttcctaataaaatgaggaaattgcatcgcattgtctgagtaggtgtcattctattctggggggtggggtggggcaggacagcaagggggaggattgggaagacaatagcaggcatgctggggatgcggtgggctctatggaccggtgcggccgcaggaacccctagtgatggagttggccactccctctctgcgcgctcgctcgctcactgaggccgcccgggcaaagcccgggcgtcgggcgacctttggtcgcccggcctcagtgagcgagcgagcgcgcagagagggagtggccaa

SEQ ID NO: 124 - DNA, 5074 bp, synthetic construct
  source 1..5074: mol_type = other DNA
ctgcgcgctcgctcgctcactgaggccgcccgggcaaagcccgggcgtcgggcgacctttggtcgcccggcctcagtgagcgagcgagcgcgcagagagggagtggccaactccatcactaggggttcctgcggccgcacgcgtctggaagatgtctttacccccagcatcagttcaagtggagcagcacataactcttgccctctgccttccaagattctggtgctgagacttatggagtgtcttggaggttgccttctgccccccaaccctgctcccagctggccctcccaggcctgggttgctggcctctgctttatcaggattctcaagagggacagctggtttatgttgcatgactgttccctgcatatctgctctggttttaaatagcttatctgagcagctggaggaccacatgggcttatatggcgtggggtacatgttcctgtagccttgtccctggcacctgccaaaatagcagccaacaccccccacccccaccgccatccccctgccccacccgtcccctgtcgcacattcctccctccgcagggctggctcaccaggccccagcccacatgcctgcttaaagccctctccatcctctgcctcacccagtccccgctgagactgagcagacgcctccaggatctgtcggcagctgctgttctgaggtaagtactagcagctacaatccagctaccattctgcttttattttatggttgggataaggctggattattctgagtccaagctaggcccttttgctaatcatgttcatacctcttatcttcctcccacagctcctgggcaacgtgctggtctgtgtgctggcccatcactttggcaaagaattgcgatcgccaccatgcctgagccggggaagtaagccagtctcagctttagcaagaagccacggtcagtggaagtggccgcaggcagccctgccgtgttcgaggccgagacagagcgggcaggagtgaaggtgcgctggcagcgcggaggcagtgacatcagcgccagcaacaagtacggcctggccacagagggcacacggcatacgctgacagtgcgggaagtgggccctgccgaccagggatcttacgcagtcattgctggctcctccaaggtcaagttcgacctcaaggtcatagaggcagagaaggcagagcccatgctggcccctgcccctgcccctgctgaggccactggagcccctggagaagccccggccccagccgctgagctgggagaaagtgccccaagtcccaaagggtcaagctcagcagctctcaatggtcctacccctggagcccccgatgaccccattggcctcttcgtgatgcggccacaggatggcgaggtgaccgtgggtggcagcatcaccttctcagcccgcgtggccggcgccagcctcctgaagccgcctgtggtcaagtggttcaagggcaaatgggtggacctgagcagcaaggtgggccagcacctgcagctgcacgacagctacgaccgcgccagcaaggtctatctgttcgagctgcacatcaccgatgcccagcctgccttcactggcagctaccgctgtgaggtgtccaccaaggacaaatttgactgctccaacttcaatctcactgtccacgaggccatgggcaccggagacctggacctcctatcagccttccgccgcacgagcctggctggaggtggtcggcggatcagtgatagccatgaggacactgggattctggacttcagctcactgctgaaaaagagagacagtttccggaccccgagggactcgaagctggaggcaccagcagaggaggacgtgtgggagatcctacggcaggcacccccatctgagtacgagcgcatcgccttccagtacggcgtcactgacctgcgcggcatgctaaagaggctcaagggcatgaggcgcgatgagaagaagagcacagcctttcagaagaagctggagccggcctaccaggtgagcaaaggccacaagatccggctgaccgtggaactggctgaccatgacgctgaggtcaaatggctcaagaatggccaggagatccagatgagcggcagcaagtacatctttgagtccatcggtgccaagcgtaccctgaccatcagccagtgctcattggcggacgacgcagcctaccagtgcgtggtgggtggcgagaagtgtagcacggagctctttgtgaaagagccccctgtgctcatcacgcgccccttggaggaccagctggtgatggtggggcagcgggtggagtttgagtgtgaagtatcggaggagggggcgcaagtcaaatggctgaaggacggggtggagctgacccgggaggagaccttcaaataccggttcaagaaggacgggcagagacaccacctgatcatcaacgaggccatgctggaggacgcggggcactatgcactgtgcactagcgggggccaggcgctggctgagctcattgtgcaggaaaagaagctggaggtgtaccagagcatcgcagacctgatggtgggcgcaaaggaccaggcggtgttcaaatgtgaggtctcagatgagaatgttcggggtgtgtggctgaagaatgggaaggagctggtgcccgacagccgcataaaggtgtcccacatcgggcgggtccacaaactgaccattgacgacgtcacacctgccgacgaggctgactacagctttgtgcccgagggcttcgcctgcaacctgtcagccaagctccacttcatggaggtcaagattgacttcgtacccaggcaggaacctcccaagatccacctggactgcccaggccgcataccagacaccattgtggttgtagctggaaataagctacgtctggacgtccctatctctggggaccctgctcccactgtgatctggcagaaggctatcacgcaggggaataaggccccagccaggccagccccagatgccccagaggacacaggtgacagcgatgagtgggtgtttgacaagaagctgctgtgtgagaccgagggccgggtccgcgtggagaccaccaaggaccgcagcatcttcacggtcgagggggcagagaaggaagatgagggcgtctacacggtcacagtgaagaaccctgtgggcgaggaccaggtcaacctcacagtcaaggtcatcgacgtgccagacgcacctgcggcccccaagatcagcaacgtgggagaggactcctgcacagtacagtgggagccgcctgcctacgatggcgggcagcccatcctgggctacatcctggagcgcaagaagaagaagagctaccggtggatgcggctgaacttcgacctgattcaggagctgagtcatgaagcgcggcgcatgatcgagggcgtggtgtacgagatgcgcgtctacgcggtcaacgccatcggcatgtccaggcccagccctgcctcccagcccttcatgcctatcggtccccccagcgaacccacccacctggcagtagaggacgtctctgacaccacggtctccctcaagtggcggcccccagagcgcgtgggagcaggaggcctggatggctacagcgtggagtactgcccagagggctgctcagagtgggtggctgccctgcaggggctgacagagcacacatcgatactggtgaaggacctgcccacgggggcccggctgcttttccgagtgcgggcacacaatatggcagggcctggagcccctgttaccaccacggagccggtgacagtgcaggagatcctgcaacggccacggcttcagctgcccaggcacctgcgccagaccattcagaagaaggtcggggagcctgtgaaccttctcatccctttccagggcaagccccggcctcaggtgacctggaccaaagaggggcagcccctggcaggcgaggaggtgagcatccgcaacagccccacagacaccatcctgttcatccgggccgctcgccgcgtgcattcaggcacttaccaggtgacggtgcgcattgagaacatggaggacaaggccacgctggtgctgcaggttgttgacaagccaagtcctccccaggatctccgggtgactgacgcctggggtcttaatgtggctctggagtggaagccaccccaggatgtcggcaacacggagctctgggggtacacagtgcagaaagccgacaagaagaccatggagtggttcaccgtcttggagcattaccgccgcacccactgcgtggtgccagagctcatcattggcaatggctactacttccgcgtcttcagccagaatatggttggctttagtgacagagcggccaccaccaaggagcccgtctttatccccagaccaggcatcacctatgagccacccaactataaggccctggacttctccgaggccccaagcttcacccagcccctggtgaaccgctcggtcatcgcgggctacactgctatgctctgctgtgctgtccggggtagccccaagcccaagatttcctggttcaagaatggcctggacctgggagaagacgcccgcttccgcatgttcagcaagcagggagtgttgactctggagattagaaagccctgcccctttgacgggggcatctatgtctgcagggccaccaacttacagggcgaggcacggtgtgagtgccgcctggaggtgcgagtgcctcagtgacctcgagctgtgccttctagttgccagccatctgttgtttgcccctcccccgtgccttccttgaccctggaaggtgccactcccactgtcctttcctaataaaatgaggaaattgcatcgcattgtctgagtaggtgtcattctattctggggggtggggtggggcaggacagcaagggggaggattgggaagacaatagcaggcatgctggggatgcggtgggctctatggaccggtgcggccgcaggaacccctagtgatggagttggccactccctctctgcgcgctcgctcgctcactgaggccgcccgggcaaagcccgggcgtcgggcgacctttggtcgcccggcctcagtgagcgagcgagcgcgcag

SEQ ID NO: 125 - DNA, 5104 bp, synthetic construct
  source 1..5104: mol_type = other DNA
ttggccactccctctctgcgcgctcgctcgctcactgaggccgcccgggcaaagcccgggcgtcgggcgacctttggtcgcccggcctcagtgagcgagcgagcgcgcagagagggagtggccaactccatcactaggggttcctgcggccgcacgcgtctggaagatgtctttacccccagcatcagttcaagtggagcagcacataactcttgccctctgccttccaagattctggtgctgagacttatggagtgtcttggaggttgccttctgccccccaaccctgctcccagctggccctcccaggcctgggttgctggcctctgctttatcaggattctcaagagggacagctggtttatgttgcatgactgttccctgcatatctgctctggttttaaatagcttatctgagcagctggaggaccacatgggcttatatggcgtggggtacatgttcctgtagccttgtccctggcacctgccaaaatagcagccaacaccccccacccccaccgccatccccctgccccacccgtcccctgtcgcacattcctccctccgcagggctggctcaccaggccccagcccacatgcctgcttaaagccctctccatcctctgcctcacccagtccccgctgagactgagcagacgcctccaggatctgtcggcagctgctgttctgaggtaagtactagcagctacaatccagctaccattctgcttttattttatggttgggataaggctggattattctgagtccaagctaggcccttttgctaatcatgttcatacctcttatcttcctcccacagctcctgggcaacgtgctggtctgtgtgctggcccatcactttggcaaagaattgcgatcgccaccatgcctgagccggggaagtaagccagtctcagctttagcaagaagccacggtcagtggaagtggccgcaggcagccctgccgtgttcgaggccgagacagagcgggcaggagtgaaggtgcgctggcagcgcggaggcagtgacatcagcgccagcaacaagtacggcctggccacagagggcacacggcatacgctgacagtgcgggaagtgggccctgccgaccagggatcttacgcagtcattgctggctcctccaaggtcaagttcgacctcaaggtcatagaggcagagaaggcagagcccatgctggcccctgcccctgcccctgctgaggccactggagcccctggagaagccccggccccagccgctgagctgggagaaagtgccccaagtcccaaagggtcaagctcagcagctctcaatggtcctacccctggagcccccgatgaccccattggcctcttcgtgatgcggccacaggatggcgaggtgaccgtgggtggcagcatcaccttctcagcccgcgtggccggcgccagcctcctgaagccgcctgtggtcaagtggttcaagggcaaatgggtggacctgagcagcaaggtgggccagcacctgcagctgcacgacagctacgaccgcgccagcaaggtctatctgttcgagctgcacatcaccgatgcccagcctgccttcactggcagctaccgctgtgaggtgtccaccaaggacaaatttgactgctccaacttcaatctcactgtccacgaggccatgggcaccggagacctggacctcctatcagccttccgccgcacgagcctggctggaggtggtcggcggatcagtgatagccatgaggacactgggattctggacttcagctcactgctgaaaaagagagacagtttccggaccccgagggactcgaagctggaggcaccagcagaggaggacgtgtgggagatcctacggcaggcacccccatctgagtacgagcgcatcgccttccagtacggcgtcactgacctgcgcggcatgctaaagaggctcaagggcatgaggcgcgatgagaagaagagcacagcctttcagaagaagctggagccggcctaccaggtgagcaaaggccacaagatccggctgaccgtggaactggctgaccatgacgctgaggtcaaatggctcaagaatggccaggagatccagatgagcggcagcaagtacatctttgagtccatcggtgccaagcgtaccctgaccatcagccagtgctcattggcggacgacgcagcctaccagtgcgtggtgggtggcgagaagtgtagcacggagctctttgtgaaagagccccctgtgctcatcacgcgccccttggaggaccagctggtgatggtggggcagcgggtggagtttgagtgtgaagtatcggaggagggggcgcaagtcaaatggctgaaggacggggtggagctgacccgggaggagaccttcaaataccggttcaagaaggacgggcagagacaccacctgatcatcaacgaggccatgctggaggacgcggggcactatgcactgtgcactagcgggggccaggcgctggctgagctcattgtgcaggaaaagaagctggaggtgtaccagagcatcgcagacctgatggtgggcgcaaaggaccaggcggtgttcaaatgtgaggtctcagatgagaatgttcggggtgtgtggctgaagaatgggaaggagctggtgcccgacagccgcataaaggtgtcccacatcgggcgggtccacaaactgaccattgacgacgtcacacctgccgacgaggctgactacagctttgtgcccgagggcttcgcctgcaacctgtcagccaagctccacttcatggaggtcaagattgacttcgtacccaggcaggaacctcccaagatccacctggactgcccaggccgcataccagacaccattgtggttgtagctggaaataagctacgtctggacgtccctatctctggggaccctgctcccactgtgatctggcagaaggctatcacgcaggggaataaggccccagccaggccagccccagatgccccagaggacacaggtgacagcgatgagtgggtgtttgacaagaagctgctgtgtgagaccgagggccgggtccgcgtggagaccaccaaggaccgcagcatcttcacggtcgagggggcagagaaggaagatgagggcgtctacacggtcacagtgaagaaccctgtgggcgaggaccaggtcaacctcacagtcaaggtcatcgacgtgccagacgcacctgcggcccccaagatcagcaacgtgggagaggactcctgcacagtacagtgggagccgcctgcctacgatggcgggcagcccatcctgggctacatcctggagcgcaagaagaagaagagctaccggtggatgcggctgaacttcgacctgattcaggagctgagtcatgaagcgcggcgcatgatcgagggcgtggtgtacgagatgcgcgtctacgcggtcaacgccatcggcatgtccaggcccagccctgcctcccagcccttcatgcctatcggtccccccagcgaacccacccacctggcagtagaggacgtctctgacaccacggtctccctcaagtggcggcccccagagcgcgtgggagcaggaggcctggatggctacagcgtggagtactgcccagagggctgctcagagtgggtggctgccctgcaggggctgacagagcacacatcgatactggtgaaggacctgcccacgggggcccggctgcttttccgagtgcgggcacacaatatggcagggcctggagcccctgttaccaccacggagccggtgacagtgcaggagatcctgcaacggccacggcttcagctgcccaggcacctgcgccagaccattcagaagaaggtcggggagcctgtgaaccttctcatccctttccagggcaagccccggcctcaggtgacctggaccaaagaggggcagcccctggcaggcgaggaggtgagcatccgcaacagccccacagacaccatcctgttcatccgggccgctcgccgcgtgcattcaggcacttaccaggtgacggtgcgcattgagaacatggaggacaaggccacgctggtgctgcaggttgttgacaagccaagtcctccccaggatctccgggtgactgacgcctggggtcttaatgtggctctggagtggaagccaccccaggatgtcggcaacacggagctctgggggtacacagtgcagaaagccgacaagaagaccatggagtggttcaccgtcttggagcattaccgccgcacccactgcgtggtgccagagctcatcattggcaatggctactacttccgcgtcttcagccagaatatggttggctttagtgacagagcggccaccaccaaggagcccgtctttatccccagaccaggcatcacctatgagccacccaactataaggccctggacttctccgaggccccaagcttcacccagcccctggtgaaccgctcggtcatcgcgggctacactgctatgctctgctgtgctgtccggggtagccccaagcccaagatttcctggttcaagaatggcctggacctgggagaagacgcccgcttccgcatgttcagcaagcagggagtgttgactctggagattagaaagccctgcccctttgacgggggcatctatgtctgcagggccaccaacttacagggcgaggcacggtgtgagtgccgcctggaggtgcgagtgcctcagtgacctcgagctgtgccttctagttgccagccatctgttgtttgcccctcccccgtgccttccttgaccctggaaggtgccactcccactgtcctttcctaataaaatgaggaaattgcatcgcattgtctgagtaggtgtcattctattctggggggtggggtggggcaggacagcaagggggaggattgggaagacaatagcaggcatgctggggatgcggtgggctctatggaccggtgcggccgcaggaacccctagtgatggagttggccactccctctctgcgcgctcgctcgctcactgaggccgcccgggcaaagcccgggcgtcgggcgacctttggtcgcccggcctcagtgagcgagcgagcgcgcagagagggagtggccaa

SEQ ID NO: 126 - DNA, 5074 bp, synthetic construct
  source 1..5074: mol_type = other DNA
ctgcgcgctcgctcgctcactgaggccgggcgaccaaaggtcgcccgacgcccgggctttgcccgggcggcctcagtgagcgagcgagcgcgcagagagggagtggccaactccatcactaggggttcctgcggccgcacgcgtctggaagatgtctttacccccagcatcagttcaagtggagcagcacataactcttgccctctgccttccaagattctggtgctgagacttatggagtgtcttggaggttgccttctgccccccaaccctgctcccagctggccctcccaggcctgggttgctggcctctgctttatcaggattctcaagagggacagctggtttatgttgcatgactgttccctgcatatctgctctggttttaaatagcttatctgagcagctggaggaccacatgggcttatatggcgtggggtacatgttcctgtagccttgtccctggcacctgccaaaatagcagccaacaccccccacccccaccgccatccccctgccccacccgtcccctgtcgcacattcctccctccgcagggctggctcaccaggccccagcccacatgcctgcttaaagccctctccatcctctgcctcacccagtccccgctgagactgagcagacgcctccaggatctgtcggcagctgctgttctgaggtaagtactagcagctacaatccagctaccattctgcttttattttatggttgggataaggctggattattctgagtccaagctaggcccttttgctaatcatgttcatacctcttatcttcctcccacagctcctgggcaacgtgctggtctgtgtgctggcccatcactttggcaaagaattgcgatcgccaccatgcctgagccggggaagtaagccagtctcagctttagcaagaagccacggtcagtggaagtggccgcaggcagccctgccgtgttcgaggccgagacagagcgggcaggagtgaaggtgcgctggcagcgcggaggcagtgacatcagcgccagcaacaagtacggcctggccacagagggcacacggcatacgctgacagtgcgggaagtgggccctgccgaccagggatcttacgcagtcattgctggctcctccaaggtcaagttcgacctcaaggtcatagaggcagagaaggcagagcccatgctggcccctgcccctgcccctgctgaggccactggagcccctggagaagccccggccccagccgctgagctgggagaaagtgccccaagtcccaaagggtcaagctcagcagctctcaatggtcctacccctggagcccccgatgaccccattggcctcttcgtgatgcggccacaggatggcgaggtgaccgtgggtggcagcatcaccttctcagcccgcgtggccggcgccagcctcctgaagccgcctgtggtcaagtggttcaagggcaaatgggtggacctgagcagcaaggtgggccagcacctgcagctgcacgacagctacgaccgcgccagcaaggtctatctgttcgagctgcacatcaccgatgcccagcctgccttcactggcagctaccgctgtgaggtgtccaccaaggacaaatttgactgctccaacttcaatctcactgtccacgaggccatgggcaccggagacctggacctcctatcagccttccgccgcacgagcctggctggaggtggtcggcggatcagtgatagccatgaggacactgggattctggacttcagctcactgctgaaaaagagagacagtttccggaccccgagggactcgaagctggaggcaccagcagaggaggacgtgtgggagatcctacggcaggcacccccatctgagtacgagcgcatcgccttccagtacggcgtcactgacctgcgcggcatgctaaagaggctcaagggcatgaggcgcgatgagaagaagagcacagcctttcagaagaagctggagccggcctaccaggtgagcaaaggccacaagatccggctgaccgtggaactggctgaccatgacgctgaggtcaaatggctcaagaatggccaggagatccagatgagcggcagcaagtacatctttgagtccatcggtgccaagcgtaccctgaccatcagccagtgctcattggcggacgacgcagcctaccagtgcgtggtgggtggcgagaagtgtagcacggagctctttgtgaaagagccccctgtgctcatcacgcgccccttggaggaccagctggtgatggtggggcagcgggtggagtttgagtgtgaagtatcggaggagggggcgcaagtcaaatggctgaaggacggggtggagctgacccgggaggagaccttcaaataccggttcaagaaggacgggcagagacaccacctgatcatcaacgaggccatgctggaggacgcggggcactatgcactgtgcactagcgggggccaggcgctggctgagctcattgtgcaggaaaagaagctggaggtgtaccagagcatcgcagacctgatggtgggcgcaaaggaccaggcggtgttcaaatgtgaggtctcagatgagaatgttcggggtgtgtggctgaagaatgggaaggagctggtgcccgacagccgcataaaggtgtcccacatcgggcgggtccacaaactgaccattgacgacgtcacacctgccgacgaggctgactacagctttgtgcccgagggcttcgcctgcaacctgtcagccaagctccacttcatggaggtcaagattgacttcgtacccaggcaggaacctcccaagatccacctggactgcccaggccgcataccagacaccattgtggttgtagctggaaataagctacgtctggacgtccctatctctggggaccctgctcccactgtgatctggcagaaggctatcacgcaggggaataaggccccagccaggccagccccagatgccccagaggacacaggtgacagcgatgagtgggtgtttgacaagaagctgctgtgtgagaccgagggccgggtccgcgtggagaccaccaaggaccgcagcatcttcacggtcgagggggcagagaaggaagatgagggcgtctacacggtcacagtgaagaaccctgtgggcgaggaccaggtcaacctcacagtcaaggtcatcgacgtgccagacgcacctgcggcccccaagatcagcaacgtgggagaggactcctgcacagtacagtgggagccgcctgcctacgatggcgggcagcccatcctgggctacatcctggagcgcaagaagaagaagagctaccggtggatgcggctgaacttcgacctgattcaggagctgagtcatgaagcgcggcgcatgatcgagggcgtggtgtacgagatgcgcgtctacgcggtcaacgccatcggcatgtccaggcccagccctgcctcccagcccttcatgcctatcggtccccccagcgaacccacccacctggcagtagaggacgtctctgacaccacggtctccctcaagtggcggcccccagagcgcgtgggagcaggaggcctggatggctacagcgtggagtactgcccagagggctgctcagagtgggtggctgccctgcaggggctgacagagcacacatcgatactggtgaaggacctgcccacgggggcccggctgcttttccgagtgcgggcacacaatatggcagggcctggagcccctgttaccaccacggagccggtgacagtgcaggagatcctgcaacggccacggcttcagctgcccaggcacctgcgccagaccattcagaagaaggtcggggagcctgtgaaccttctcatccctttccagggcaagccccggcctcaggtgacctggaccaaagaggggcagcccctggcaggcgaggaggtgagcatccgcaacagccccacagacaccatcctgttcatccgggccgctcgccgcgtgcattcaggcacttaccaggtgacggtgcgcattgagaacatggaggacaaggccacgctggtgctgcaggttgttgacaagccaagtcctccccaggatctccgggtgactgacgcctggggtcttaatgtggctctggagtggaagccaccccaggatgtcggcaacacggagctctgggggtacacagtgcagaaagccgacaagaagaccatggagtggttcaccgtcttggagcattaccgccgcacccactgcgtggtgccagagctcatcattggcaatggctactacttccgcgtcttcagccagaatatggttggctttagtgacagagcggccaccaccaaggagcccgtctttatccccagaccaggcatcacctatgagccacccaactataaggccctggacttctccgaggccccaagcttcacccagcccctggtgaaccgctcggtcatcgcgggctacactgctatgctctgctgtgctgtccggggtagccccaagcccaagatttcctggttcaagaatggcctggacctgggagaagacgcccgcttccgcatgttcagcaagcagggagtgttgactctggagattagaaagccctgcccctttgacgggggcatctatgtctgcagggccaccaacttacagggcgaggcacggtgtgagtgccgcctggaggtgcgagtgcctcagtgacctcgagctgtgccttctagttgccagccatctgttgtttgcccctcccccgtgccttccttgaccctggaaggtgccactcccactgtcctttcctaataaaatgaggaaattgcatcgcattgtctgagtaggtgtcattctattctggggggtggggtggggcaggacagcaagggggaggattgggaagacaatagcaggcatgctggggatgcggtgggctctatggaccggtgcggccgcaggaacccctagtgatggagttggccactccctctctgcgcgctcgctcgctcactgaggccgggcgaccaaaggtcgcccgacgcccgggctttgcccgggcggcctcagtgagcgagcgagcgcgcag

SEQ ID NO: 127 - DNA, 5104 bp, synthetic construct
  source 1..5104: mol_type = other DNA
ttggccactccctctctgcgcgctcgctcgctcactgaggccgggcgaccaaaggtcgcccgacgcccgggctttgcccgggcggcctcagtgagcgagcgagcgcgcagagagggagtggccaactccatcactaggggttcctgcggccgcacgcgtctggaagatgtctttacccccagcatcagttcaagtggagcagcacataactcttgccctctgccttccaagattctggtgctgagacttatggagtgtcttggaggttgccttctgccccccaaccctgctcccagctggccctcccaggcctgggttgctggcctctgctttatcaggattctcaagagggacagctggtttatgttgcatgactgttccctgcatatctgctctggttttaaatagcttatctgagcagctggaggaccacatgggcttatatggcgtggggtacatgttcctgtagccttgtccctggcacctgccaaaatagcagccaacaccccccacccccaccgccatccccctgccccacccgtcccctgtcgcacattcctccctccgcagggctggctcaccaggccccagcccacatgcctgcttaaagccctctccatcctctgcctcacccagtccccgctgagactgagcagacgcctccaggatctgtcggcagctgctgttctgaggtaagtactagcagctacaatccagctaccattctgcttttattttatggttgggataaggctggattattctgagtccaagctaggcccttttgctaatcatgttcatacctcttatcttcctcccacagctcctgggcaacgtgctggtctgtgtgctggcccatcactttggcaaagaattgcgatcgccaccatgcctgagccggggaagtaagccagtctcagctttagcaagaagccacggtcagtggaagtggccgcaggcagccctgccgtgttcgaggccgagacagagcgggcaggagtgaaggtgcgctggcagcgcggaggcagtgacatcagcgccagcaacaagtacggcctggccacagagggcacacggcatacgctgacagtgcgggaagtgggccctgccgaccagggatcttacgcagtcattgctggctcctccaaggtcaagttcgacctcaaggtcatagaggcagagaaggcagagcccatgctggcccctgcccctgcccctgctgaggccactggagcccctggagaagccccggccccagccgctgagctgggagaaagtgccccaagtcccaaagggtcaagctcagcagctctcaatggtcctacccctggagcccccgatgaccccattggcctcttcgtgatgcggccacaggatggcgaggtgaccgtgggtggcagcatcaccttctcagcccgcgtggccggcgccagcctcctgaagccgcctgtggtcaagtggttcaagggcaaatgggtggacctgagcagcaaggtgggccagcacctgcagctgcacgacagctacgaccgcgccagcaaggtctatctgttcgagctgcacatcaccgatgcccagcctgccttcactggcagctaccgctgtgaggtgtccaccaaggacaaatttgactgctccaacttcaatctcactgtccacgaggccatgggcaccggagacctggacctcctatcagccttccgccgcacgagcctggctggaggtggtcggcggatcagtgatagccatgaggacactgggattctggacttcagctcactgctgaaaaagagagacagtttccggaccccgagggactcgaagctggaggcaccagcagaggaggacgtgtgggagatcctacggcaggcacccccatctgagtacgagcgcatcgccttccagtacggcgtcactgacctgcgcggcatgctaaagaggctcaagggcatgaggcgcgatgagaagaagagcacagcctttcagaagaagctggagccggcctaccaggtgagcaaaggccacaagatccggctgaccgtggaactggctgaccatgacgctgaggtcaaatggctcaagaatggccaggagatccagatgagcggcagcaagtacatctttgagtccatcggtgccaagcgtaccctgaccatcagccagtgctcattggcggacgacgcagcctaccagtgcgtggtgggtggcgagaagtgtagcacggagctctttgtgaaagagccccctgtgctcatcacgcgccccttggaggaccagctggtgatggtggggcagcgggtggagtttgagtgtgaagtatcggaggagggggcgcaagtcaaatggctgaaggacggggtggagctgacccgggaggagaccttcaaataccggttcaagaaggacgggcagagacaccacctgatcatcaacgaggccatgctggaggacgcggggcactatgcactgtgcactagcgggggccaggcgctggctgagctcattgtgcaggaaaagaagctggaggtgtaccagagcatcgcagacctgatggtgggcgcaaaggaccaggcggtgttcaaatgtgaggtctcagatgagaatgttcggggtgtgtggctgaagaatgggaaggagctggtgcccgacagccgcataaaggtgtcccacatcgggcgggtccacaaactgaccattgacgacgtcacacctgccgacgaggctgactacagctttgtgcccgagggcttcgcctgcaacctgtcagccaagctccacttcatggaggtcaagattgacttcgtacccaggcaggaacctcccaagatccacctggactgcccaggccgcataccagacaccattgtggttgtagctggaaataagctacgtctggacgtccctatctctggggaccctgctcccactgtgatctggcagaaggctatcacgcaggggaataaggccccagccaggccagccccagatgccccagaggacacaggtgacagcgatgagtgggtgtttgacaagaagctgctgtgtgagaccgagggccgggtccgcgtggagaccaccaaggaccgcagcatcttcacggtcgagggggcagagaaggaagatgagggcgtctacacggtcacagtgaagaaccctgtgggcgaggaccaggtcaacctcacagtcaaggtcatcgacgtgccagacgcacctgcggcccccaagatcagcaacgtgggagaggactcctgcacagtacagtgggagccgcctgcctacgatggcgggcagcccatcctgggctacatcctggagcgcaagaagaagaagagctaccggtggatgcggctgaacttcgacctgattcaggagctgagtcatgaagcgcggcgcatgatcgagggcgtggtgtacgagatgcgcgtctacgcggtcaacgccatcggcatgtccaggcccagccctgcctcccagcccttcatgcctatcggtccccccagcgaacccacccacctggcagtagaggacgtctctgacaccacggtctccctcaagtggcggcccccagagcgcgtgggagcaggaggcctggatggctacagcgtggagtactgcccagagggctgctcagagtgggtggctgccctgcaggggctgacagagcacacatcgatactggtgaaggacctgcccacgggggcccggctgcttttccgagtgcgggcacacaatatggcagggcctggagcccctgttaccaccacggagccggtgacagtgcaggagatcctgcaacggccacggcttcagctgcccaggcacctgcgccagaccattcagaagaaggtcggggagcctgtgaaccttctcatccctttccagggcaagccccggcctcaggtgacctggaccaaagaggggcagcccctggcaggcgaggaggtgagcatccgcaacagccccacagacaccatcctgttcatccgggccgctcgccgcgtgcattcaggcacttaccaggtgacggtgcgcattgagaacatggaggacaaggccacgctggtgctgcaggttgttgacaagccaagtcctccccaggatctccgggtgactgacgcctggggtcttaatgtggctctggagtggaagccaccccaggatgtcggcaacacggagctctgggggtacacagtgcagaaagccgacaagaagaccatggagtggttcaccgtcttggagcattaccgccgcacccactgcgtggtgccagagctcatcattggcaatggctactacttccgcgtcttcagccagaatatggttggctttagtgacagagcggccaccaccaaggagcccgtctttatccccagaccaggcatcacctatgagccacccaactataaggccctggacttctccgaggccccaagcttcacccagcccctggtgaaccgctcggtcatcgcgggctacactgctatgctctgctgtgctgtccggggtagccccaagcccaagatttcctggttcaagaatggcctggacctgggagaagacgcccgcttccgcatgttcagcaagcagggagtgttgactctggagattagaaagccctgcccctttgacgggggcatctatgtctgcagggccaccaacttacagggcgaggcacggtgtgagtgccgcctggaggtgcgagtgcctcagtgacctcgagctgtgccttctagttgccagccatctgttgtttgcccctcccccgtgccttccttgaccctggaaggtgccactcccactgtcctttcctaataaaatgaggaaattgcatcgcattgtctgagtaggtgtcattctattctggggggtggggtggggcaggacagcaagggggaggattgggaagacaatagcaggcatgctggggatgcggtgggctctatggaccggtgcggccgcaggaacccctagtgatggagttggccactccctctctgcgcgctcgctcgctcactgaggccgggcgaccaaaggtcgcccgacgcccgggctttgcccgggcggcctcagtgagcgagcgagcgcgcagagagggagtggccaa

SEQ ID NO: 128 - DNA, 4939 bp, synthetic construct
  source 1..4939: mol_type = other DNA
ctgcgcgctcgctcgctcactgaggccgggcgaccaaaggtcgcccgacgcccgggctttgcccgggcggcctcagtgagcgagcgagcgcgcagagagggagtggccaactccatcactaggggttcctgcggccgcccttccaagattctggtgctgagacttatggagtgtcttggaggttgccttctgccccccaaccctgctcccagctggccctcccaggcctgggttgctggcctctgctttatcaggattctcaagagggacagctggtttatgttgcatgactgttccctgcatatctgctctggttttaaatagcttatctgagcagctggaggaccacatgggcttatatggcgtggggtacatgttcctgtagccttgtccctggcacctgccaaaatagcagccaacaccccccacccccaccgccatccccctgccccacccgtcccctgtcgcacattcctccctccgcagggctggctcaccaggccccagcccacatgcctgcttaaagccctctccatcctctgcctcacccagtccccgctgagactgagcagacgcctccaggatctgtcggcagctgctgttctgagccaccatgcctgagccggggaagaagccagtctcagcttttagcaagaagccacggtcagtggaagtggccgcaggcagccctgccgtgttcgaggccgagacagagcgggcaggagtgaaggtgcgctggcagcgcggaggcagtgacatcagcgccagcaacaagtacggcctggccacagagggcacacggcatacgctgacagtgcgggaagtgggccctgccgaccagggatcttacgcagtcattgctggctcctccaaggtcaagttcgacctcaaggtcatagaggcaggtaagtactagcagctacaatccagctaccattctgcttttattttatggttgggataaggctggattattctgagtccaagctaggcccttttgctaatcatgttcatacctcttatcttcctcccacagagaaggcagagcccatgctggcccctgcccctgcccctgctgaggccactggagcccctggagaagccccggccccagccgctgagctgggagaaagtgccccaagtcccaaagggtcaagctcagcagctctcaatggtcctacccctggagcccccgatgaccccattggcctcttcgtgatgcggccacaggatggcgaggtgaccgtgggtggcagcatcaccttctcagcccgcgtggccggcgccagcctcctgaagccgcctgtggtcaagtggttcaagggcaaatgggtggacctgagcagcaaggtgggccagcacctgcagctgcacgacagctacgaccgcgccagcaaggtctatctgttcgagctgcacatcaccgatgcccagcctgccttcactggcagctaccgctgtgaggtgtccaccaaggacaaatttgactgctccaacttcaatctcactgtccacgaggccatgggcaccggagacctggacctcctatcagccttccgccgcacgagcctggctggaggtggtcggcggatcagtgatagccatgaggacactgggattctggacttcagctcactgctgaaaaagagagacagtttccggaccccgagggactcgaagctggaggcaccagcagaggaggacgtgtgggagatcctacggcaggcacccccatctgagtacgagcgcatcgccttccagtacggcgtcactgacctgcgcggcatgctaaagaggctcaagggcatgaggcgcgatgagaagaagagcacagcctttcagaagaagctggagccggcctaccaggtgagcaaaggccacaagatccggctgaccgtggaactggctgaccatgacgctgaggtcaaatggctcaagaatggccaggagatccagatgagcggcagcaagtacatctttgagtccatcggtgccaagcgtaccctgaccatcagccagtgctcattggcggacgacgcagcctaccagtgcgtggtgggtggcgagaagtgtagcacggagctctttgtgaaagagccccctgtgctcatcacgcgccccttggaggaccagctggtgatggtggggcagcgggtggagtttgagtgtgaagtatcggaggagggggcgcaagtcaaatggctgaaggacggggtggagctgacccgggaggagaccttcaaataccggttcaagaaggacgggcagagacaccacctgatcatcaacgaggccatgctggaggacgcggggcactatgcactgtgcactagcgggggccaggcgctggctgagctcattgtgcaggaaaagaagctggaggtgtaccagagcatcgcagacctgatggtgggcgcaaaggaccaggcggtgttcaaatgtgaggtctcagatgagaatgttcggggtgtgtggctgaagaatgggaaggagctggtgcccgacagccgcataaaggtgtcccacatcgggcgggtccacaaactgaccattgacgacgtcacacctgccgacgaggctgactacagctttgtgcccgagggcttcgcctgcaacctgtcagccaagctccacttcatggaggtcaagattgacttcgtacccaggcaggaacctcccaagatccacctggactgcccaggccgcataccagacaccattgtggttgtagctggaaataagctacgtctggacgtccctatctctggggaccctgctcccactgtgatctggcagaaggctatcacgcaggggaataaggccccagccaggccagccccagatgccccagaggacacaggtgacagcgatgagtgggtgtttgacaagaagctgctgtgtgagaccgagggccgggtccgcgtggagaccaccaaggaccgcagcatcttcacggtcgagggggcagagaaggaagatgagggcgtctacacggtcacagtgaagaaccctgtgggcgaggaccaggtcaacctcacagtcaaggtcatcgacgtgccagacgcacctgcggcccccaagatcagcaacgtgggagaggactcctgcacagtacagtgggagccgcctgcctacgatggcgggcagcccatcctgggctacatcctggagcgcaagaagaagaagagctaccggtggatgcggctgaacttcgacctgattcaggagctgagtcatgaagcgcggcgcatgatcgagggcgtggtgtacgagatgcgcgtctacgcggtcaacgccatcggcatgtccaggcccagccctgcctcccagcccttcatgcctatcggtccccccagcgaacccacccacctggcagtagaggacgtctctgacaccacggtctccctcaagtggcggcccccagagcgcgtgggagcaggaggcctggatggctacagcgtggagtactgcccagagggctgctcagagtgggtggctgccctgcaggggctgacagagcacacatcgatactggtgaaggacctgcccacgggggcccggctgcttttccgagtgcgggcacacaatatggcagggcctggagcccctgttaccaccacggagccggtgacagtgcaggagatcctgcaacggccacggcttcagctgcccaggcacctgcgccagaccattcagaagaaggtcggggagcctgtgaaccttctcatccctttccagggcaagccccggcctcaggtgacctggaccaaagaggggcagcccctggcaggcgaggaggtgagcatccgcaacagccccacagacaccatcctgttcatccgggccgctcgccgcgtgcattcaggcacttaccaggtgacggtgcgcattgagaacatggaggacaaggccacgctggtgctgcaggttgttgacaagccaagtcctccccaggatctccgggtgactgacgcctggggtcttaatgtggctctggagtggaagccaccccaggatgtcggcaacacggagctctgggggtacacagtgcagaaagccgacaagaagaccatggagtggttcaccgtcttggagcattaccgccgcacccactgcgtggtgccagagctcatcattggcaatggctactacttccgcgtcttcagccagaatatggttggctttagtgacagagcggccaccaccaaggagcccgtctttatccccagaccaggcatcacctatgagccacccaactataaggccctggacttctccgaggccccaagcttcacccagcccctggtgaaccgctcggtcatcgcgggctacactgctatgctctgctgtgctgtccggggtagccccaagcccaagatttcctggttcaagaatggcctggacctgggagaagacgcccgcttccgcatgttcagcaagcagggagtgttgactctggagattagaaagccctgcccctttgacgggggcatctatgtctgcagggccaccaacttacagggcgaggcacggtgtgagtgccgcctggaggtgcgagtgcctcagtgacctcgagctgtgccttctagttgccagccatctgttgtttgcccctcccccgtgccttccttgaccctggaaggtgccactcccactgtcctttcctaataaaatgaggaaattgcatcgcattgtctgagtaggtgtcattctattctggggggtggggtggggcaggacagcaagggggaggattgggaagacaatagcaggcatgctggggatgcggtgggctctatgggcggccgcaggaacccctagtgatggagttggccactccctctctgcgcgctcgctcgctcactgaggccgcccgggcaaagcccgggcgtcgggcgacctttggtcgcccggcctcagtgagcgagcgagcgcgcag

SEQ ID NO: 129 - DNA, 4969 bp, synthetic construct
  source 1..4969: mol_type = other DNA
ttggccactccctctctgcgcgctcgctcgctcactgaggccgggcgaccaaaggtcgcccgacgcccgggctttgcccgggcggcctcagtgagcgagcgagcgcgcagagagggagtggccaactccatcactaggggttcctgcggccgcccttccaagattctggtgctgagacttatggagtgtcttggaggttgccttctgccccccaaccctgctcccagctggccctcccaggcctgggttgctggcctctgctttatcaggattctcaagagggacagctggtttatgttgcatgactgttccctgcatatctgctctggttttaaatagcttatctgagcagctggaggaccacatgggcttatatggcgtggggtacatgttcctgtagccttgtccctggcacctgccaaaatagcagccaacaccccccacccccaccgccatccccctgccccacccgtcccctgtcgcacattcctccctccgcagggctggctcaccaggccccagcccacatgcctgcttaaagccctctccatcctctgcctcacccagtccccgctgagactgagcagacgcctccaggatctgtcggcagctgctgttctgagccaccatgcctgagccggggaagaagccagtctcagcttttagcaagaagccacggtcagtggaagtggccgcaggcagccctgccgtgttcgaggccgagacagagcgggcaggagtgaaggtgcgctggcagcgcggaggcagtgacatcagcgccagcaacaagtacggcctggccacagagggcacacggcatacgctgacagtgcgggaagtgggccctgccgaccagggatcttacgcagtcattgctggctcctccaaggtcaagttcgacctcaaggtcatagaggcaggtaagtactagcagctacaatccagctaccattctgcttttattttatggttgggataaggctggattattctgagtccaagctaggcccttttgctaatcatgttcatacctcttatcttcctcccacagagaaggcagagcccatgctggcccctgcccctgcccctgctgaggccactggagcccctggagaagccccggccccagccgctgagctgggagaaagtgccccaagtcccaaagggtcaagctcagcagctctcaatggtcctacccctggagcccccgatgaccccattggcctcttcgtgatgcggccacaggatggcgaggtgaccgtgggtggcagcatcaccttctcagcccgcgtggccggcgccagcctcctgaagccgcctgtggtcaagtggttcaagggcaaatgggtggacctgagcagcaaggtgggccagcacctgcagctgcacgacagctacgaccgcgccagcaaggtctatctgttcgagctgcacatcaccgatgcccagcctgccttcactggcagctaccgctgtgaggtgtccaccaaggacaaatttgactgctccaacttcaatctcactgtccacgaggccatgggcaccggagacctggacctcctatcagccttccgccgcacgagcctggctggaggtggtcggcggatcagtgatagccatgaggacactgggattctggacttcagctcactgctgaaaaagagagacagtttccggaccccgagggactcgaagctggaggcaccagcagaggaggacgtgtgggagatcctacggcaggcacccccatctgagtacgagcgcatcgccttccagtacggcgtcactgacctgcgcggcatgctaaagaggctcaagggcatgaggcgcgatgagaagaagagcacagcctttcagaagaagctggagccggcctaccaggtgagcaaaggccacaagatccggctgaccgtggaactggctgaccatgacgctgaggtcaaatggctcaagaatggccaggagatccagatgagcggcagcaagtacatctttgagtccatcggtgccaagcgtaccctgaccatcagccagtgctcattggcggacgacgcagcctaccagtgcgtggtgggtggcgagaagtgtagcacggagctctttgtgaaagagccccctgtgctcatcacgcgccccttggaggaccagctggtgatggtggggcagcgggtggagtttgagtgtgaagtatcggaggagggggcgcaagtcaaatggctgaaggacggggtggagctgacccgggaggagaccttcaaataccggttcaagaaggacgggcagagacaccacctgatcatcaacgaggccatgctggaggacgcggggcactatgcactgtgcactagcgggggccaggcgctggctgagctcattgtgcaggaaaagaagctggaggtgtaccagagcatcgcagacctgatggtgggcgcaaaggaccaggcggtgttcaaatgtgaggtctcagatgagaatgttcggggtgtgtggctgaagaatgggaaggagctggtgcccgacagccgcataaaggtgtcccacatcgggcgggtccacaaactgaccattgacgacgtcacacctgccgacgaggctgactacagctttgtgcccgagggcttcgcctgcaacctgtcagccaagctccacttcatggaggtcaagattgacttcgtacccaggcaggaacctcccaagatccacctggactgcccaggccgcataccagacaccattgtggttgtagctggaaataagctacgtctggacgtccctatctctggggaccctgctcccactgtgatctggcagaaggctatcacgcaggggaataaggccccagccaggccagccccagatgccccagaggacacaggtgacagcgatgagtgggtgtttgacaagaagctgctgtgtgagaccgagggccgggtccgcgtggagaccaccaaggaccgcagcatcttcacggtcgagggggcagagaaggaagatgagggcgtctacacggtcacagtgaagaaccctgtgggcgaggaccaggtcaacctcacagtcaaggtcatcgacgtgccagacgcacctgcggcccccaagatcagcaacgtgggagaggactcctgcacagtacagtgggagccgcctgcctacgatggcgggcagcccatcctgggctacatcctggagcgcaagaagaagaagagctaccggtggatgcggctgaacttcgacctgattcaggagctgagtcatgaagcgcggcgcatgatcgagggcgtggtgtacgagatgcgcgtctacgcggtcaacgccatcggcatgtccaggcccagccctgcctcccagcccttcatgcctatcggtccccccagcgaacccacccacctggcagtagaggacgtctctgacaccacggtctccctcaagtggcggcccccagagcgcgtgggagcaggaggcctggatggctacagcgtggagtactgcccagagggctgctcagagtgggtggctgccctgcaggggctgacagagcacacatcgatactggtgaaggacctgcccacgggggcccggctgcttttccgagtgcgggcacacaatatggcagggcctggagcccctgttaccaccacggagccggtgacagtgcaggagatcctgcaacggccacggcttcagctgcccaggcacctgcgccagaccattcagaagaaggtcggggagcctgtgaaccttctcatccctttccagggcaagccccggcctcaggtgacctggaccaaagaggggcagcccctggcaggcgaggaggtgagcatccgcaacagccccacagacaccatcctgttcatccgggccgctcgccgcgtgcattcaggcacttaccaggtgacggtgcgcattgagaacatggaggacaaggccacgctggtgctgcaggttgttgacaagccaagtcctccccaggatctccgggtgactgacgcctggggtcttaatgtggctctggagtggaagccaccccaggatgtcggcaacacggagctctgggggtacacagtgcagaaagccgacaagaagaccatggagtggttcaccgtcttggagcattaccgccgcacccactgcgtggtgccagagctcatcattggcaatggctactacttccgcgtcttcagccagaatatggttggctttagtgacagagcggccaccaccaaggagcccgtctttatccccagaccaggcatcacctatgagccacccaactataaggccctggacttctccgaggccccaagcttcacccagcccctggtgaaccgctcggtcatcgcgggctacactgctatgctctgctgtgctgtccggggtagccccaagcccaagatttcctggttcaagaatggcctggacctgggagaagacgcccgcttccgcatgttcagcaagcagggagtgttgactctggagattagaaagccctgcccctttgacgggggcatctatgtctgcagggccaccaacttacagggcgaggcacggtgtgagtgccgcctggaggtgcgagtgcctcagtgacctcgagctgtgccttctagttgccagccatctgttgtttgcccctcccccgtgccttccttgaccctggaaggtgccactcccactgtcctttcctaataaaatgaggaaattgcatcgcattgtctgagtaggtgtcattctattctggggggtggggtggggcaggacagcaagggggaggattgggaagacaatagcaggcatgctggggatgcggtgggctctatgggcggccgcttggccactccctctctgcgcgctcgctcgctcactgaggccgcccgggcaaagcccgggcgtcgggcgacctttggtcgcccggcctcagtgagcgagcgagcgcgcagagagggagtggccaactccatcactaggggttcct

SEQ ID NO: 130 - DNA, 4939 bp, synthetic construct
  source 1..4939: mol_type = other DNA
ctgcgcgctcgctcgctcactgaggccgcccgggcaaagcccgggcgtcgggcgacctttggtcgcccggcctcagtgagcgagcgagcgcgcagagagggagtggccaactccatcactaggggttcctgcggccgcccttccaagattctggtgctgagacttatggagtgtcttggaggttgccttctgccccccaaccctgctcccagctggccctcccaggcctgggttgctggcctctgctttatcaggattctcaagagggacagctggtttatgttgcatgactgttccctgcatatctgctctggttttaaatagcttatctgagcagctggaggaccacatgggcttatatggcgtggggtacatgttcctgtagccttgtccctggcacctgccaaaatagcagccaacaccccccacccccaccgccatccccctgccccacccgtcccctgtcgcacattcctccctccgcagggctggctcaccaggccccagcccacatgcctgcttaaagccctctccatcctctgcctcacccagtccccgctgagactgagcagacgcctccaggatctgtcggcagctgctgttctgagccaccatgcctgagccggggaagaagccagtctcagcttttagcaagaagccacggtcagtggaagtggccgcaggcagccctgccgtgttcgaggccgagacagagcgggcaggagtgaaggtgcgctggcagcgcggaggcagtgacatcagcgccagcaacaagtacggcctggccacagagggcacacggcatacgctgacagtgcgggaagtgggccctgccgaccagggatcttacgcagtcattgctggctcctccaaggtcaagttcgacctcaaggtcatagaggcaggtaagtactagcagctacaatccagctaccattctgcttttattttatggttgggataaggctggattattctgagtccaagctaggcccttttgctaatcatgttcatacctcttatcttcctcccacagagaaggcagagcccatgctggcccctgcccctgcccctgctgaggccactggagcccctggagaagccccggccccagccgctgagctgggagaaagtgccccaagtcccaaagggtcaagctcagcagctctcaatggtcctacccctggagcccccgatgaccccattggcctcttcgtgatgcggccacaggatggcgaggtgaccgtgggtggcagcatcaccttctcagcccgcgtggccggcgccagcctcctgaagccgcctgtggtcaagtggttcaagggcaaatgggtggacctgagcagcaaggtgggccagcacctgcagctgcacgacagctacgaccgcgccagcaaggtctatctgttcgagctgcacatcaccgatgcccagcctgccttcactggcagctaccgctgtgaggtgtccaccaaggacaaatttgactgctccaacttcaatctcactgtccacgaggccatgggcaccggagacctggacctcctatcagccttccgccgcacgagcctggctggaggtggtcggcggatcagtgatagccatgaggacactgggattctggacttcagctcactgctgaaaaagagagacagtttccggaccccgagggactcgaagctggaggcaccagcagaggaggacgtgtgggagatcctacggcaggcacccccatctgagtacgagcgcatcgccttccagtacggcgtcactgacctgcgcggcatgctaaagaggctcaagggcatgaggcgcgatgagaagaagagcacagcctttcagaagaagctggagccggcctaccaggtgagcaaaggccacaagatccggctgaccgtggaactggctgaccatgacgctgaggtcaaatggctcaagaatggccaggagatccagatgagcggcagcaagtacatctttgagtccatcggtgccaagcgtaccctgaccatcagccagtgctcattggcggacgacgcagcctaccagtgcgtggtgggtggcgagaagtgtagcacggagctctttgtgaaagagccccctgtgctcatcacgcgccccttggaggaccagctggtgatggtggggcagcgggtggagtttgagtgtgaagtatcggaggagggggcgcaagtcaaatggctgaaggacggggtggagctgacccgggaggagaccttcaaataccggttcaagaaggacgggcagagacaccacctgatcatcaacgaggccatgctggaggacgcggggcactatgcactgtgcactagcgggggccaggcgctggctgagctcattgtgcaggaaaagaagctggaggtgtaccagagcatcgcagacctgatggtgggcgcaaaggaccaggcggtgttcaaatgtgaggtctcagatgagaatgttcggggtgtgtggctgaagaatgggaaggagctggtgcccgacagccgcataaaggtgtcccacatcgggcgggtccacaaactgaccattgacgacgtcacacctgccgacgaggctgactacagctttgtgcccgagggcttcgcctgcaacctgtcagccaagctccacttcatggaggtcaagattgacttcgtacccaggcaggaacctcccaagatccacctggactgcccaggccgcataccagacaccattgtggttgtagctggaaataagctacgtctggacgtccctatctctggggaccctgctcccactgtgatctggcagaaggctatcacgcaggggaataaggccccagccaggccagccccagatgccccagaggacacaggtgacagcgatgagtgggtgtttgacaagaagctgctgtgtgagaccgagggccgggtccgcgtggagaccaccaaggaccgcagcatcttcacggtcgagggggcagagaaggaagatgagggcgtctacacggtcacagtgaagaaccctgtgggcgaggaccaggtcaacctcacagtcaaggtcatcgacgtgccagacgcacctgcggcccccaagatcagcaacgtgggagaggactcctgcacagtacagtgggagccgcctgcctacgatggcgggcagcccatcctgggctacatcctggagcgcaagaagaagaagagctaccggtggatgcggctgaacttcgacctgattcaggagctgagtcatgaagcgcggcgcatgatcgagggcgtggtgtacgagatgcgcgtctacgcggtcaacgccatcggcatgtccaggcccagccctgcctcccagcccttcatgcctatcggtccccccagcgaacccacccacctggcagtagaggacgtctctgacaccacggtctccctcaagtggcggcccccagagcgcgtgggagcaggaggcctggatggctacagcgtggagtactgcccagagggctgctcagagtgggtggctgccctgcaggggctgacagagcacacatcgatactggtgaaggacctgcccacgggggcccggctgcttttccgagtgcgggcacacaatatggcagggcctggagcccctgttaccaccacggagccggtgacagtgcaggagatcctgcaacggccacggcttcagctgcccaggcacctgcgccagaccattcagaagaaggtcggggagcctgtgaaccttctcatccctttccagggcaagccccggcctcaggtgacctggaccaaagaggggcagcccctggcaggcgaggaggtgagcatccgcaacagccccacagacaccatcctgttcatccgggccgctcgccgcgtgcattcaggcacttaccaggtgacggtgcgcattgagaacatggaggacaaggccacgctggtgctgcaggttgttgacaagccaagtcctccccaggatctccgggtgactgacgcctggggtcttaatgtggctctggagtggaagccaccccaggatgtcggcaacacggagctctgggggtacacagtgcagaaagccgacaagaagaccatggagtggttcaccgtcttggagcattaccgccgcacccactgcgtggtgccagagctcatcattggcaatggctactacttccgcgtcttcagccagaatatggttggctttagtgacagagcggccaccaccaaggagcccgtctttatccccagaccaggcatcacctatgagccacccaactataaggccctggacttctccgaggccccaagcttcacccagcccctggtgaaccgctcggtcatcgcgggctacactgctatgctctgctgtgctgtccggggtagccccaagcccaagatttcctggttcaagaatggcctggacctgggagaagacgcccgcttccgcatgttcagcaagcagggagtgttgactctggagattagaaagccctgcccctttgacgggggcatctatgtctgcagggccaccaacttacagggcgaggcacggtgtgagtgccgcctggaggtgcgagtgcctcagtgacctcgagctgtgccttctagttgccagccatctgttgtttgcccctcccccgtgccttccttgaccctggaaggtgccactcccactgtcctttcctaataaaatgaggaaattgcatcgcattgtctgagtaggtgtcattctattctggggggtggggtggggcaggacagcaagggggaggattgggaagacaatagcaggcatgctggggatgcggtgggctctatgggcggccgcaggaacccctagtgatggagttggccactccctctctgcgcgctcgctcgctcactgaggccgcccgggcaaagcccgggcgtcgggcgacctttggtcgcccggcctcagtgagcgagcgagcgcgcag

SEQ ID NO: 131 - DNA, 4969 bp, synthetic construct
  source 1..4969: mol_type = other DNA
ttggccactccctctctgcgcgctcgctcgctcactgaggccgcccgggcaaagcccgggcgtcgggcgacctttggtcgcccggcctcagtgagcgagcgagcgcgcagagagggagtggccaactccatcactaggggttcctgcggccgcccttccaagattctggtgctgagacttatggagtgtcttggaggttgccttctgccccccaaccctgctcccagctggccctcccaggcctgggttgctggcctctgctttatcaggattctcaagagggacagctggtttatgttgcatgactgttccctgcatatctgctctggttttaaatagcttatctgagcagctggaggaccacatgggcttatatggcgtggggtacatgttcctgtagccttgtccctggcacctgccaaaatagcagccaacaccccccacccccaccgccatccccctgccccacccgtcccctgtcgcacattcctccctccgcagggctggctcaccaggccccagcccacatgcctgcttaaagccctctccatcctctgcctcacccagtccccgctgagactgagcagacgcctccaggatctgtcggcagctgctgttctgagccaccatgcctgagccggggaagaagccagtctcagcttttagcaagaagccacggtcagtggaagtggccgcaggcagccctgccgtgttcgaggccgagacagagcgggcaggagtgaaggtgcgctggcagcgcggaggcagtgacatcagcgccagcaacaagtacggcctggccacagagggcacacggcatacgctgacagtgcgggaagtgggccctgccgaccagggatcttacgcagtcattgctggctcctccaaggtcaagttcgacctcaaggtcatagaggcaggtaagtactagcagctacaatccagctaccattctgcttttattttatggttgggataaggctggattattctgagtccaagctaggcccttttgctaatcatgttcatacctcttatcttcctcccacagagaaggcagagcccatgctggcccctgcccctgcccctgctgaggccactggagcccctggagaagccccggccccagccgctgagctgggagaaagtgccccaagtcccaaagggtcaagctcagcagctctcaatggtcctacccctggagcccccgatgaccccattggcctcttcgtgatgcggccacaggatggcgaggtgaccgtgggtggcagcatcaccttctcagcccgcgtggccggcgccagcctcctgaagccgcctgtggtcaagtggttcaagggcaaatgggtggacctgagcagcaaggtgggccagcacctgcagctgcacgacagctacgaccgcgccagcaaggtctatctgttcgagctgcacatcaccgatgcccagcctgccttcactggcagctaccgctgtgaggtgtccaccaaggacaaatttgactgctccaacttcaatctcactgtccacgaggccatgggcaccggagacctggacctcctatcagccttccgccgcacgagcctggctggaggtggtcggcggatcagtgatagccatgaggacactgggattctggacttcagctcactgctgaaaaagagagacagtttccggaccccgagggactcgaagctggaggcaccagcagaggaggacgtgtgggagatcctacggcaggcacccccatctgagtacgagcgcatcgccttccagtacggcgtcactgacctgcgcggcatgctaaagaggctcaagggcatgaggcgcgatgagaagaagagcacagcctttcagaagaagctggagccggcctaccaggtgagcaaaggccacaagatccggctgaccgtggaactggctgaccatgacgctgaggtcaaatggctcaagaatggccaggagatccagatgagcggcagcaagtacatctttgagtccatcggtgccaagcgtaccctgaccatcagccagtgctcattggcggacgacgcagcctaccagtgcgtggtgggtggcgagaagtgtagcacggagctctttgtgaaagagccccctgtgctcatcacgcgccccttggaggaccagctggtgatggtggggcagcgggtggagtttgagtgtgaagtatcggaggagggggcgcaagtcaaatggctgaaggacggggtggagctgacccgggaggagaccttcaaataccggttcaagaaggacgggcagagacaccacctgatcatcaacgaggccatgctggaggacgcggggcactatgcactgtgcactagcgggggccaggcgctggctgagctcattgtgcaggaaaagaagctggaggtgtaccagagcatcgcagacctgatggtgggcgcaaaggaccaggcggtgttcaaatgtgaggtctcagatgagaatgttcggggtgtgtggctgaagaatgggaaggagctggtgcccgacagccgcataaaggtgtcccacatcgggcgggtccacaaactgaccattgacgacgtcacacctgccgacgaggctgactacagctttgtgcccgagggcttcgcctgcaacctgtcagccaagctccacttcatggaggtcaagattgacttcgtacccaggcaggaacctcccaagatccacctggactgcccaggccgcataccagacaccattgtggttgtagctggaaataagctacgtctggacgtccctatctctggggaccctgctcccactgtgatctggcagaaggctatcacgcaggggaataaggccccagccaggccagccccagatgccccagaggacacaggtgacagcgatgagtgggtgtttgacaagaagctgctgtgtgagaccgagggccgggtccgcgtggagaccaccaaggaccgcagcatcttcacggtcgagggggcagagaaggaagatgagggcgtctacacggtcacagtgaagaaccctgtgggcgaggaccaggtcaacctcacagtcaaggtcatcgacgtgccagacgcacctgcggcccccaagatcagcaacgtgggagaggactcctgcacagtacagtgggagccgcctgcctacgatggcgggcagcccatcctgggctacatcctggagcgcaagaagaagaagagctaccggtggatgcggctgaacttcgacctgattcaggagctgagtcatgaagcgcggcgcatgatcgagggcgtggtgtacgagatgcgcgtctacgcggtcaacgccatcggcatgtccaggcccagccctgcctcccagcccttcatgcctatcggtccccccagcgaacccacccacctggcagtagaggacgtctctgacaccacggtctccctcaagtggcggcccccagagcgcgtgggagcaggaggcctggatggctacagcgtggagtactgcccagagggctgctcagagtgggtggctgccctgcaggggctgacagagcacacatcgatactggtgaaggacctgcccacgggggcccggctgcttttccgagtgcgggcacacaatatggcagggcctggagcccctgttaccaccacggagccggtgacagtgcaggagatcctgcaacggccacggcttcagctgcccaggcacctgcgccagaccattcagaagaaggtcggggagcctgtgaaccttctcatccctttccagggcaagccccggcctcaggtgacctggaccaaagaggggcagcccctggcaggcgaggaggtgagcatccgcaacagccccacagacaccatcctgttcatccgggccgctcgccgcgtgcattcaggcacttaccaggtgacggtgcgcattgagaacatggaggacaaggccacgctggtgctgcaggttgttgacaagccaagtcctccccaggatctccgggtgactgacgcctggggtcttaatgtggctctggagtggaagccaccccaggatgtcggcaacacggagctctgggggtacacagtgcagaaagccgacaagaagaccatggagtggttcaccgtcttggagcattaccgccgcacccactgcgtggtgccagagctcatcattggcaatggctactacttccgcgtcttcagccagaatatggttggctttagtgacagagcggccaccaccaaggagcccgtctttatccccagaccaggcatcacctatgagccacccaactataaggccctggacttctccgaggccccaagcttcacccagcccctggtgaaccgctcggtcatcgcgggctacactgctatgctctgctgtgctgtccggggtagccccaagcccaagatttcctggttcaagaatggcctggacctgggagaagacgcccgcttccgcatgttcagcaagcagggagtgttgactctggagattagaaagccctgcccctttgacgggggcatctatgtctgcagggccaccaacttacagggcgaggcacggtgtgagtgccgcctggaggtgcgagtgcctcagtgacctcgagctgtgccttctagttgccagccatctgttgtttgcccctcccccgtgccttccttgaccctggaaggtgccactcccactgtcctttcctaataaaatgaggaaattgcatcgcattgtctgagtaggtgtcattctattctggggggtggggtggggcaggacagcaagggggaggattgggaagacaatagcaggcatgctggggatgcggtgggctctatgggcggccgcaggaacccctagtgatggagttggccactccctctctgcgcgctcgctcgctcactgaggccgcccgggcaaagcccgggcgtcgggcgacctttggtcgcccggcctcagtgagcgagcgagcgcgcagagagggagtggccaa

SEQ ID NO: 132 - DNA, 4939 bp, synthetic construct
  source 1..4939: mol_type = other DNA
ctgcgcgctcgctcgctcactgaggccgggcgaccaaaggtcgcccgacgcccgggctttgcccgggcggcctcagtgagcgagcgagcgcgcagagagggagtggccaactccatcactaggggttcctgcggccgcccttccaagattctggtgctgagacttatggagtgtcttggaggttgccttctgccccccaaccctgctcccagctggccctcccaggcctgggttgctggcctctgctttatcaggattctcaagagggacagctggtttatgttgcatgactgttccctgcatatctgctctggttttaaatagcttatctgagcagctggaggaccacatgggcttatatggcgtggggtacatgttcctgtagccttgtccctggcacctgccaaaatagcagccaacaccccccacccccaccgccatccccctgccccacccgtcccctgtcgcacattcctccctccgcagggctggctcaccaggccccagcccacatgcctgcttaaagccctctccatcctctgcctcacccagtccccgctgagactgagcagacgcctccaggatctgtcggcagctgctgttctgagccaccatgcctgagccggggaagaagccagtctcagcttttagcaagaagccacggtcagtggaagtggccgcaggcagccctgccgtgttcgaggccgagacagagcgggcaggagtgaaggtgcgctggcagcgcggaggcagtgacatcagcgccagcaacaagtacggcctggccacagagggcacacggcatacgctgacagtgcgggaagtgggccctgccgaccagggatcttacgcagtcattgctggctcctccaaggtcaagttcgacctcaaggtcatagaggcaggtaagtactagcagctacaatccagctaccattctgcttttattttatggttgggataaggctggattattctgagtccaagctaggcccttttgctaatcatgttcatacctcttatcttcctcccacagagaaggcagagcccatgctggcccctgcccctgcccctgctgaggccactggagcccctggagaagccccggccccagccgctgagctgggagaaagtgccccaagtcccaaagggtcaagctcagcagctctcaatggtcctacccctggagcccccgatgaccccattggcctcttcgtgatgcggccacaggatggcgaggtgaccgtgggtggcagcatcaccttctcagcccgcgtggccggcgccagcctcctgaagccgcctgtggtcaagtggttcaagggcaaatgggtggacctgagcagcaaggtgggccagcacctgcagctgcacgacagctacgaccgcgccagcaaggtctatctgttcgagctgcacatcaccgatgcccagcctgccttcactggcagctaccgctgtgaggtgtccaccaaggacaaatttgactgctccaacttcaatctcactgtccacgaggccatgggcaccggagacctggacctcctatcagccttccgccgcacgagcctggctggaggtggtcggcggatcagtgatagccatgaggacactgggattctggacttcagctcactgctgaaaaagagagacagtttccggaccccgagggactcgaagctggaggcaccagcagaggaggacgtgtgggagatcctacggcaggcacccccatctgagtacgagcgcatcgccttccagtacggcgtcactgacctgcgcggcatgctaaagaggctcaagggcatgaggcgcgatgagaagaagagcacagcctttcagaagaagctggagccggcctaccaggtgagcaaaggccacaagatccggctgaccgtggaactggctgaccatgacgctgaggtcaaatggctcaagaatggccaggagatccagatgagcggcagcaagtacatctttgagtccatcggtgccaagcgtaccctgaccatcagccagtgctcattggcggacgacgcagcctaccagtgcgtggtgggtggcgagaagtgtagcacggagctctttgtgaaagagccccctgtgctcatcacgcgccccttggaggaccagctggtgatggtggggcagcgggtggagtttgagtgtgaagtatcggaggagggggcgcaagtcaaatggctgaaggacggggtggagctgacccgggaggagaccttcaaataccggttcaagaaggacgggcagagacaccacctgatcatcaacgaggccatgctggaggacgcggggcactatgcactgtgcactagcgggggccaggcgctggctgagctcattgtgcaggaaaagaagctggaggtgtaccagagcatcgcagacctgatggtgggcgcaaaggaccaggcggtgttcaaatgtgaggtctcagatgagaatgttcggggtgtgtggctgaagaatgggaaggagctggtgcccgacagccgcataaaggtgtcccacatcgggcgggtccacaaactgaccattgacgacgtcacacctgccgacgaggctgactacagctttgtgcccgagggcttcgcctgcaacctgtcagccaagctccacttcatggaggtcaagattgacttcgtacccaggcaggaacctcccaagatccacctggactgcccaggccgcataccagacaccattgtggttgtagctggaaataagctacgtctggacgtccctatctctggggaccctgctcccactgtgatctggcagaaggctatcacgcaggggaataaggccccagccaggccagccccagatgccccagaggacacaggtgacagcgatgagtgggtgtttgacaagaagctgctgtgtgagaccgagggccgggtccgcgtggagaccaccaaggaccgcagcatcttcacggtcgagggggcagagaaggaagatgagggcgtctacacggtcacagtgaagaaccctgtgggcgaggaccaggtcaacctcacagtcaaggtcatcgacgtgccagacgcacctgcggcccccaagatcagcaacgtgggagaggactcctgcacagtacagtgggagccgcctgcctacgatggcgggcagcccatcctgggctacatcctggagcgcaagaagaagaagagctaccggtggatgcggctgaacttcgacctgattcaggagctgagtcatgaagcgcggcgcatgatcgagggcgtggtgtacgagatgcgcgtctacgcggtcaacgccatcggcatgtccaggcccagccctgcctcccagcccttcatgcctatcggtccccccagcgaacccacccacctggcagtagaggacgtctctgacaccacggtctccctcaagtggcggcccccagagcgcgtgggagcaggaggcctggatggctacagcgtggagtactgcccagagggctgctcagagtgggtggctgccctgcaggggctgacagagcacacatcgatactggtgaaggacctgcccacgggggcccggctgcttttccgagtgcgggcacacaatatggcagggcctggagcccctgttaccaccacggagccggtgacagtgcaggagatcctgcaacggccacggcttcagctgcccaggcacctgcgccagaccattcagaagaaggtcggggagcctgtgaaccttctcatccctttccagggcaagccccggcctcaggtgacctggaccaaagaggggcagcccctggcaggcgaggaggtgagcatccgcaacagccccacagacaccatcctgttcatccgggccgctcgccgcgtgcattcaggcacttaccaggtgacggtgcgcattgagaacatggaggacaaggccacgctggtgctgcaggttgttgacaagccaagtcctccccaggatctccgggtgactgacgcctggggtcttaatgtggctctggagtggaagccaccccaggatgtcggcaacacggagctctgggggtacacagtgcagaaagccgacaagaagaccatggagtggttcaccgtcttggagcattaccgccgcacccactgcgtggtgccagagctcatcattggcaatggctactacttccgcgtcttcagccagaatatggttggctttagtgacagagcggccaccaccaaggagcccgtctttatccccagaccaggcatcacctatgagccacccaactataaggccctggacttctccgaggccccaagcttcacccagcccctggtgaaccgctcggtcatcgcgggctacactgctatgctctgctgtgctgtccggggtagccccaagcccaagatttcctggttcaagaatggcctggacctgggagaagacgcccgcttccgcatgttcagcaagcagggagtgttgactctggagattagaaagccctgcccctttgacgggggcatctatgtctgcagggccaccaacttacagggcgaggcacggtgtgagtgccgcctggaggtgcgagtgcctcagtgacctcgagctgtgccttctagttgccagccatctgttgtttgcccctcccccgtgccttccttgaccctggaaggtgccactcccactgtcctttcctaataaaatgaggaaattgcatcgcattgtctgagtaggtgtcattctattctggggggtggggtggggcaggacagcaagggggaggattgggaagacaatagcaggcatgctggggatgcggtgggctctatgggcggccgcaggaacccctagtgatggagttggccactccctctctgcgcgctcgctcgctcactgaggccgggcgaccaaaggtcgcccgacgcccgggctttgcccgggcggcctcagtgagcgagcgagcgcgcag

SEQ ID NO: 133 - DNA, 4969 bp, synthetic construct
  source 1..4969: mol_type = other DNA
ttggccactccctctctgcgcgctcgctcgctcactgaggccgggcgaccaaaggtcgcccgacgcccgggctttgcccgggcggcctcagtgagcgagcgagcgcgcagagagggagtggccaactccatcactaggggttcctgcggccgcccttccaagattctggtgctgagacttatggagtgtcttggaggttgccttctgccccccaaccctgctcccagctggccctcccaggcctgggttgctggcctctgctttatcaggattctcaagagggacagctggtttatgttgcatgactgttccctgcatatctgctctggttttaaatagcttatctgagcagctggaggaccacatgggcttatatggcgtggggtacatgttcctgtagccttgtccctggcacctgccaaaatagcagccaacaccccccacccccaccgccatccccctgccccacccgtcccctgtcgcacattcctccctccgcagggctggctcaccaggccccagcccacatgcctgcttaaagccctctccatcctctgcctcacccagtccccgctgagactgagcagacgcctccaggatctgtcggcagctgctgttctgagccaccatgcctgagccggggaagaagccagtctcagcttttagcaagaagccacggtcagtggaagtggccgcaggcagccctgccgtgttcgaggccgagacagagcgggcaggagtgaaggtgcgctggcagcgcggaggcagtgacatcagcgccagcaacaagtacggcctggccacagagggcacacggcatacgctgacagtgcgggaagtgggccctgccgaccagggatcttacgcagtcattgctggctcctccaaggtcaagttcgacctcaaggtcatagaggcaggtaagtactagcagctacaatccagctaccattctgcttttattttatggttgggataaggctggattattctgagtccaagctaggcccttttgctaatcatgttcatacctcttatcttcctcccacagagaaggcagagcccatgctggcccctgcccctgcccctgctgaggccactggagcccctggagaagccccggccccagccgctgagctgggagaaagtgccccaagtcccaaagggtcaagctcagcagctctcaatggtcctacccctggagcccccgatgaccccattggcctcttcgtgatgcggccacaggatggcgaggtgaccgtgggtggcagcatcaccttctcagcccgcgtggccggcgccagcctcctgaagccgcctgtggtcaagtggttcaagggcaaatgggtggacctgagcagcaaggtgggccagcacctgcagctgcacgacagctacgaccgcgccagcaaggtctatctgttcgagctgcacatcaccgatgcccagcctgccttcactggcagctaccgctgtgaggtgtccaccaaggacaaatttgactgctccaacttcaatctcactgtccacgaggccatgggcaccggagacctggacctcctatcagccttccgccgcacgagcctggctggaggtggtcggcggatcagtgatagccatgaggacactgggattctggacttcagctcactgctgaaaaagagagacagtttccggaccccgagggactcgaagctggaggcaccagcagaggaggacgtgtgggagatcctacggcaggcacccccatctgagtacgagcgcatcgccttccagtacggcgtcactgacctgcgcggcatgctaaagaggctcaagggcatgaggcgcgatgagaagaagagcacagcctttcagaagaagctggagccggcctaccaggtgagcaaaggccacaagatccggctgaccgtggaactggctgaccatgacgctgaggtcaaatggctcaagaatggccaggagatccagatgagcggcagcaagtacatctttgagtccatcggtgccaagcgtaccctgaccatcagccagtgctcattggcggacgacgcagcctaccagtgcgtggtgggtggcgagaagtgtagcacggagctctttgtgaaagagccccctgtgctcatcacgcgccccttggaggaccagctggtgatggtggggcagcgggtggagtttgagtgtgaagtatcggaggagggggcgcaagtcaaatggctgaaggacggggtggagctgacccgggaggagaccttcaaataccggttcaagaaggacgggcagagacaccacctgatcatcaacgaggccatgctggaggacgcggggcactatgcactgtgcactagcgggggccaggcgctggctgagctcattgtgcaggaaaagaagctggaggtgtaccagagcatcgcagacctgatggtgggcgcaaaggaccaggcggtgttcaaatgtgaggtctcagatgagaatgttcggggtgtgtggctgaagaatgggaaggagctggtgcccgacagccgcataaaggtgtcccacatcgggcgggtccacaaactgaccattgacgacgtcacacctgccgacgaggctgactacagctttgtgcccgagggcttcgcctgcaacctgtcagccaagctccacttcatggaggtcaagattgacttcgtacccaggcaggaacctcccaagatccacctggactgcccaggccgcataccagacaccattgtggttgtagctggaaataagctacgtctggacgtccctatctctggggaccctgctcccactgtgatctggcagaaggctatcacgcaggggaataaggccccagccaggccagccccagatgccccagaggacacaggtgacagcgatgagtgggtgtttgacaagaagctgctgtgtgagaccgagggccgggtccgcgtggagaccaccaaggaccgcagcatcttcacggtcgagggggcagagaaggaagatgagggcgtctacacggtcacagtgaagaaccctgtgggcgaggaccaggtcaacctcacagtcaaggtcatcgacgtgccagacgcacctgcggcccccaagatcagcaacgtgggagaggactcctgcacagtacagtgggagccgcctgcctacgatggcgggcagcccatcctgggctacatcctggagcgcaagaagaagaagagctaccggtggatgcggctgaacttcgacctgattcaggagctgagtcatgaagcgcggcgcatgatcgagggcgtggtgtacgagatgcgcgtctacgcggtcaacgccatcggcatgtccaggcccagccctgcctcccagcccttcatgcctatcggtccccccagcgaacccacccacctggcagtagaggacgtctctgacaccacggtctccctcaagtggcggcccccagagcgcgtgggagcaggaggcctggatggctacagcgtggagtactgcccagagggctgctcagagtgggtggctgccctgcaggggctgacagagcacacatcgatactggtgaaggacctgcccacgggggcccggctgcttttccgagtgcgggcacacaatatggcagggcctggagcccctgttaccaccacggagccggtgacagtgcaggagatcctgcaacggccacggcttcagctgcccaggcacctgcgccagaccattcagaagaaggtcggggagcctgtgaaccttctcatccctttccagggcaagccccggcctcaggtgacctggaccaaagaggggcagcccctggcaggcgaggaggtgagcatccgcaacagccccacagacaccatcctgttcatccgggccgctcgccgcgtgcattcaggcacttaccaggtgacggtgcgcattgagaacatggaggacaaggccacgctggtgctgcaggttgttgacaagccaagtcctccccaggatctccgggtgactgacgcctggggtcttaatgtggctctggagtggaagccaccccaggatgtcggcaacacggagctctgggggtacacagtgcagaaagccgacaagaagaccatggagtggttcaccgtcttggagcattaccgccgcacccactgcgtggtgccagagctcatcattggcaatggctactacttccgcgtcttcagccagaatatggttggctttagtgacagagcggccaccaccaaggagcccgtctttatccccagaccaggcatcacctatgagccacccaactataaggccctggacttctccgaggccccaagcttcacccagcccctggtgaaccgctcggtcatcgcgggctacactgctatgctctgctgtgctgtccggggtagccccaagcccaagatttcctggttcaagaatggcctggacctgggagaagacgcccgcttccgcatgttcagcaagcagggagtgttgactctggagattagaaagccctgcccctttgacgggggcatctatgtctgcagggccaccaacttacagggcgaggcacggtgtgagtgccgcctggaggtgcgagtgcctcagtgacctcgagctgtgccttctagttgccagccatctgttgtttgcccctcccccgtgccttccttgaccctggaaggtgccactcccactgtcctttcctaataaaatgaggaaattgcatcgcattgtctgagtaggtgtcattctattctggggggtggggtggggcaggacagcaagggggaggattgggaagacaatagcaggcatgctggggatgcggtgggctctatgggcggccgcaggaacccctagtgatggagttggccactccctctctgcgcgctcgctcgctcactgaggccgggcgaccaaaggtcgcccgacgcccgggctttgcccgggcggcctcagtgagcgagcgagcgcgcagagagggagtggccaa

SEQ ID NO: 134 - DNA, 4939 bp, synthetic construct
  source 1..4939: mol_type = other DNA
ctgcgcgctcgctcgctcactgaggccgggcgaccaaaggtcgcccgacgcccgggctttgcccgggcggcctcagtgagcgagcgagcgcgcagagagggagtggccaactccatcactaggggttcctgcggccgcctggaagatgtctttacccccagcatcagttcaagtggagcagcacataactcttgccctctgccttccaagattctggtgctgagacttatggagtgtcttggaggttgccttctgccccccaaccctgctcccagctggccctcccaggcctgggttgctggcctctgctttatcaggattctcaagagggacagctggtttatgttgcatgactgttccctgcatatctgctctggttttaaatagcttatctgagcagctggaggaccacatgggcttatatggcgtggggtacatgttcctgtagccttgtccctggcacctgccaaaatagcagccaacaccccccacccccaccgccatccccctgccccacccgtcccctgtcgcacattcctccctccgcagggctggctcaccaggccccagcccacatgcctgcttaaagccctctccatcctctgcctcacccagtccccgctgagactgagcagacgcctccaggatctgtcggcagctgctgttctgagccaccatgcctgagccggggaagaagccagtctcagcttttagcaagaagccacggtcagtggaagtggccgcaggcagccctgccgtgttcgaggccgagacagagcgggcaggagtgaaggtgcgctggcagcgcggaggcagtgacatcagcgccagcaacaagtacggcctggccacagagggcacacggcatacgctgacagtgcgggaagtgggccctgccgaccagggatcttacgcagtcattgctggctcctccaaggtcaagttcgacctcaaggtcatagaggcaggtaagtactagcagctacaatccagctaccattctgcttttattttatggttgggataaggctggattattctgagtccaagctaggcccttttgctaatcatgttcatacctcttatcttcctcccacagagaaggcagagcccatgctggcccctgcccctgcccctgctgaggccactggagcccctggagaagccccggccccagccgctgagctgggagaaagtgccccaagtcccaaagggtcaagctcagcagctctcaatggtcctacccctggagcccccgatgaccccattggcctcttcgtgatgcggccacaggatggcgaggtgaccgtgggtggcagcatcaccttctcagcccgcgtggccggcgccagcctcctgaagccgcctgtggtcaagtggttcaagggcaaatgggtggacctgagcagcaaggtgggccagcacctgcagctgcacgacagctacgaccgcgccagcaaggtctatctgttcgagctgcacatcaccgatgcccagcctgccttcactggcagctaccgctgtgaggtgtccaccaaggacaaatttgactgctccaacttcaatctcactgtccacgaggccatgggcaccggagacctggacctcctatcagccttccgccgcacgagcctggctggaggtggtcggcggatcagtgatagccatgaggacactgggattctggacttcagctcactgctgaaaaagagagacagtttccggaccccgagggactcgaagctggaggcaccagcagaggaggacgtgtgggagatcctacggcaggcacccccatctgagtacgagcgcatcgccttccagtacggcgtcactgacctgcgcggcatgctaaagaggctcaagggcatgaggcgcgatgagaagaagagcacagcctttcagaagaagctggagccggcctaccaggtgagcaaaggccacaagatccggctgaccgtggaactggctgaccatgacgctgaggtcaaatggctcaagaatggccaggagatccagatgagcggcagcaagtacatctttgagtccatcggtgccaagcgtaccctgaccatcagccagtgctcattggcggacgacgcagcctaccagtgcgtggtgggtggcgagaagtgtagcacggagctctttgtgaaagagccccctgtgctcatcacgcgccccttggaggaccagctggtgatggtggggcagcgggtggagtttgagtgtgaagtatcggaggagggggcgcaagtcaaatggctgaaggacggggtggagctgacccgggaggagaccttcaaataccggttcaagaaggacgggcagagacaccacctgatcatcaacgaggccatgctggaggacgcggggcactatgcactgtgcactagcgggggccaggcgctggctgagctcattgtgcaggaaaagaagctggaggtgtaccagagcatcgcagacctgatggtgggcgcaaaggaccaggcggtgttcaaatgtgaggtctcagatgagaatgttcggggtgtgtggctgaagaatgggaaggagctggtgcccgacagccgcataaaggtgtcccacatcgggcgggtccacaaactgaccattgacgacgtcacacctgccgacgaggctgactacagctttgtgcccgagggcttcgcctgcaacctgtcagccaagctccacttcatggaggtcaagattgacttcgtacccaggcaggaacctcccaagatccacctggactgcccaggccgcataccagacaccattgtggttgtagctggaaataagctacgtctggacgtccctatctctggggaccctgctcccactgtgatctggcagaaggctatcacgcaggggaataaggccccagccaggccagccccagatgccccagaggacacaggtgacagcgatgagtgggtgtttgacaagaagctgctgtgtgagaccgagggccgggtccgcgtggagaccaccaaggaccgcagcatcttcacggtcgagggggcagagaaggaagatgagggcgtctacacggtcacagtgaagaaccctgtgggcgaggaccaggtcaacctcacagtcaaggtcatcgacgtgccagacgcacctgcggcccccaagatcagcaacgtgggagaggactcctgcacagtacagtgggagccgcctgcctacgatggcgggcagcccatcctgggctacatcctggagcgcaagaagaagaagagctaccggtggatgcggctgaacttcgacctgattcaggagctgagtcatgaagcgcggcgcatgatcgagggcgtggtgtacgagatgcgcgtctacgcggtcaacgccatcggcatgtccaggcccagccctgcctcccagcccttcatgcctatcggtccccccagcgaacccacccacctggcagtagaggacgtctctgacaccacggtctccctcaagtggcggcccccagagcgcgtgggagcaggaggcctggatggctacagcgtggagtactgcccagagggctgctcagagtgggtggctgccctgcaggggctgacagagcacacatcgatactggtgaaggacctgcccacgggggcccggctgcttttccgagtgcgggcacacaatatggcagggcctggagcccctgttaccaccacggagccggtgacagtgcaggagatcctgcaacggccacggcttcagctgcccaggcacctgcgccagaccattcagaagaaggtcggggagcctgtgaaccttctcatccctttccagggcaagccccggcctcaggtgacctggaccaaagaggggcagcccctggcaggcgaggaggtgagcatccgcaacagccccacagacaccatcctgttcatccgggccgctcgccgcgtgcattcaggcacttaccaggtgacggtgcgcattgagaacatggaggacaaggccacgctggtgctgcaggttgttgacaagccaagtcctccccaggatctccgggtgactgacgcctggggtcttaatgtggctctggagtggaagccaccccaggatgtcggcaacacggagctctgggggtacacagtgcagaaagccgacaagaagaccatggagtggttcaccgtcttggagcattaccgccgcacccactgcgtggtgccagagctcatcattggcaatggctactacttccgcgtcttcagccagaatatggttggctttagtgacagagcggccaccaccaaggagcccgtctttatccccagaccaggcatcacctatgagccacccaactataaggccctggacttctccgaggccccaagcttcacccagcccctggtgaaccgctcggtcatcgcgggctacactgctatgctctgctgtgctgtccggggtagccccaagcccaagatttcctggttcaagaatggcctggacctgggagaagacgcccgcttccgcatgttcagcaagcagggagtgttgactctggagattagaaagccctgcccctttgacgggggcatctatgtctgcagggccaccaacttacagggcgaggcacggtgtgagtgccgcctggaggtgcgagtgcctcagtgaaccctggaaggtgccactcccactgtcctttcctaataaaatgaggaaattgcatcgcattgtctgagtaggtgtcattctattctggggggtggggtggggcaggacagcaagggggaggattgggaagacaatagcaggcatgctggggatgcggtgggctctatgggcggccgcaggaacccctagtgatggagttggccactccctctctgcgcgctcgctcgctcactgaggccgcccgggcaaagcccgggcgtcgggcgacctttggtcgcccggcctcagtgagcgagcgagcgcgcag

SEQ ID NO: 135 - DNA, 4969 bp, synthetic construct
  source 1..4969: mol_type = other DNA
ttggccactccctctctgcgcgctcgctcgctcactgaggccgggcgaccaaaggtcgcccgacgcccgggctttgcccgggcggcctcagtgagcgagcgagcgcgcagagagggagtggccaactccatcactaggggttcctgcggccgcctggaagatgtctttacccccagcatcagttcaagtggagcagcacataactcttgccctctgccttccaagattctggtgctgagacttatggagtgtcttggaggttgccttctgccccccaaccctgctcccagctggccctcccaggcctgggttgctggcctctgctttatcaggattctcaagagggacagctggtttatgttgcatgactgttccctgcatatctgctctggttttaaatagcttatctgagcagctggaggaccacatgggcttatatggcgtggggtacatgttcctgtagccttgtccctggcacctgccaaaatagcagccaacaccccccacccccaccgccatccccctgccccacccgtcccctgtcgcacattcctccctccgcagggctggctcaccaggccccagcccacatgcctgcttaaagccctctccatcctctgcctcacccagtccccgctgagactgagcagacgcctccaggatctgtcggcagctgctgttctgagccaccatgcctgagccggggaagaagccagtctcagcttttagcaagaagccacggtcagtggaagtggccgcaggcagccctgccgtgttcgaggccgagacagagcgggcaggagtgaaggtgcgctggcagcgcggaggcagtgacatcagcgccagcaacaagtacggcctggccacagagggcacacggcatacgctgacagtgcgggaagtgggccctgccgaccagggatcttacgcagtcattgctggctcctccaaggtcaagttcgacctcaaggtcatagaggcaggtaagtactagcagctacaatccagctaccattctgcttttattttatggttgggataaggctggattattctgagtccaagctaggcccttttgctaatcatgttcatacctcttatcttcctcccacagagaaggcagagcccatgctggcccctgcccctgcccctgctgaggccactggagcccctggagaagccccggccccagccgctgagctgggagaaagtgccccaagtcccaaagggtcaagctcagcagctctcaatggtcctacccctggagcccccgatgaccccattggcctcttcgtgatgcggccacaggatggcgaggtgaccgtgggtggcagcatcaccttctcagcccgcgtggccggcgccagcctcctgaagccgcctgtggtcaagtggttcaagggcaaatgggtggacctgagcagcaaggtgggccagcacctgcagctgcacgacagctacgaccgcgccagcaaggtctatctgttcgagctgcacatcaccgatgcccagcctgccttcactggcagctaccgctgtgaggtgtccaccaaggacaaatttgactgctccaacttcaatctcactgtccacgaggccatgggcaccggagacctggacctcctatcagccttccgccgcacgagcctggctggaggtggtcggcggatcagtgatagccatgaggacactgggattctggacttcagctcactgctgaaaaagagagacagtttccggaccccgagggactcgaagctggaggcaccagcagaggaggacgtgtgggagatcctacggcaggcacccccatctgagtacgagcgcatcgccttccagtacggcgtcactgacctgcgcggcatgctaaagaggctcaagggcatgaggcgcgatgagaagaagagcacagcctttcagaagaagctggagccggcctaccaggtgagcaaaggccacaagatccggctgaccgtggaactggctgaccatgacgctgaggtcaaatggctcaagaatggccaggagatccagatgagcggcagcaagtacatctttgagtccatcggtgccaagcgtaccctgaccatcagccagtgctcattggcggacgacgcagcctaccagtgcgtggtgggtggcgagaagtgtagcacggagctctttgtgaaagagccccctgtgctcatcacgcgccccttggaggaccagctggtgatggtggggcagcgggtggagtttgagtgtgaagtatcggaggagggggcgcaagtcaaatggctgaaggacggggtggagctgacccgggaggagaccttcaaataccggttcaagaaggacgggcagagacaccacctgatcatcaacgaggccatgctggaggacgcggggcactatgcactgtgcactagcgggggccaggcgctggctgagctcattgtgcaggaaaagaagctggaggtgtaccagagcatcgcagacctgatggtgggcgcaaaggaccaggcggtgttcaaatgtgaggtctcagatgagaatgttcggggtgtgtggctgaagaatgggaaggagctggtgcccgacagccgcataaaggtgtcccacatcgggcgggtccacaaactgaccattgacgacgtcacacctgccgacgaggctgactacagctttgtgcccgagggcttcgcctgcaacctgtcagccaagctccacttcatggaggtcaagattgacttcgtacccaggcaggaacctcccaagatccacctggactgcccaggccgcataccagacaccattgtggttgtagctggaaataagctacgtctggacgtccctatctctggggaccctgctcccactgtgatctggcagaaggctatcacgcaggggaataaggccccagccaggccagccccagatgccccagaggacacaggtgacagcgatgagtgggtgtttgacaagaagctgctgtgtgagaccgagggccgggtccgcgtggagaccaccaaggaccgcagcatcttcacggtcgagggggcagagaaggaagatgagggcgtctacacggtcacagtgaagaaccctgtgggcgaggaccaggtcaacctcacagtcaaggtcatcgacgtgccagacgcacctgcggcccccaagatcagcaacgtgggagaggactcctgcacagtacagtgggagccgcctgcctacgatggcgggcagcccatcctgggctacatcctggagcgcaagaagaagaagagctaccggtggatgcggctgaacttcgacctgattcaggagctgagtcatgaagcgcggcgcatgatcgagggcgtggtgtacgagatgcgcgtctacgcggtcaacgccatcggcatgtccaggcccagccctgcctcccagcccttcatgcctatcggtccccccagcgaacccacccacctggcagtagaggacgtctctgacaccacggtctccctcaagtggcggcccccagagcgcgtgggagcaggaggcctggatggctacagcgtggagtactgcccagagggctgctcagagtgggtggctgccctgcaggggctgacagagcacacatcgatactggtgaaggacctgcccacgggggcccggctgcttttccgagtgcgggcacacaatatggcagggcctggagcccctgttaccaccacggagccggtgacagtgcaggagatcctgcaacggccacggcttcagctgcccaggcacctgcgccagaccattcagaagaaggtcggggagcctgtgaaccttctcatccctttccagggcaagccccggcctcaggtgacctggaccaaagaggggcagcccctggcaggcgaggaggtgagcatccgcaacagccccacagacaccatcctgttcatccgggccgctcgccgcgtgcattcaggcacttaccaggtgacggtgcgcattgagaacatggaggacaaggccacgctggtgctgcaggttgttgacaagccaagtcctccccaggatctccgggtgactgacgcctggggtcttaatgtggctctggagtggaagccaccccaggatgtcggcaacacggagctctgggggtacacagtgcagaaagccgacaagaagaccatggagtggttcaccgtcttggagcattaccgccgcacccactgcgtggtgccagagctcatcattggcaatggctactacttccgcgtcttcagccagaatatggttggctttagtgacagagcggccaccaccaaggagcccgtctttatccccagaccaggcatcacctatgagccacccaactataaggccctggacttctccgaggccccaagcttcacccagcccctggtgaaccgctcggtcatcgcgggctacactgctatgctctgctgtgctgtccggggtagccccaagcccaagatttcctggttcaagaatggcctggacctgggagaagacgcccgcttccgcatgttcagcaagcagggagtgttgactctggagattagaaagccctgcccctttgacgggggcatctatgtctgcagggccaccaacttacagggcgaggcacggtgtgagtgccgcctggaggtgcgagtgcctcagtgaaccctggaaggtgccactcccactgtcctttcctaataaaatgaggaaattgcatcgcattgtctgagtaggtgtcattctattctggggggtggggtggggcaggacagcaagggggaggattgggaagacaatagcaggcatgctggggatgcggtgggctctatgggcggccgcaggaacccctagtgatggagttggccactccctctctgcgcgctcgctcgctcactgaggccgcccgggcaaagcccgggcgtcgggcgacctttggtcgcccggcctcagtgagcgagcgagcgcgcagagagggagtggccaa

SEQ ID NO: 136 - DNA, 4939 bp, synthetic construct
  source 1..4939: mol_type = other DNA
ctgcgcgctcgctcgctcactgaggccgcccgggcaaagcccgggcgtcgggcgacctttggtcgcccggcctcagtgagcgagcgagcgcgcagagagggagtggccaactccatcactaggggttcctgcggccgcctggaagatgtctttacccccagcatcagttcaagtggagcagcacataactcttgccctctgccttccaagattctggtgctgagacttatggagtgtcttggaggttgccttctgccccccaaccctgctcccagctggccctcccaggcctgggttgctggcctctgctttatcaggattctcaagagggacagctggtttatgttgcatgactgttccctgcatatctgctctggttttaaatagcttatctgagcagctggaggaccacatgggcttatatggcgtggggtacatgttcctgtagccttgtccctggcacctgccaaaatagcagccaacaccccccacccccaccgccatccccctgccccacccgtcccctgtcgcacattcctccctccgcagggctggctcaccaggccccagcccacatgcctgcttaaagccctctccatcctctgcctcacccagtccccgctgagactgagcagacgcctccaggatctgtcggcagctgctgttctgagccaccatgcctgagccggggaagaagccagtctcagcttttagcaagaagccacggtcagtggaagtggccgcaggcagccctgccgtgttcgaggccgagacagagcgggcaggagtgaaggtgcgctggcagcgcggaggcagtgacatcagcgccagcaacaagtacggcctggccacagagggcacacggcatacgctgacagtgcgggaagtgggccctgccgaccagggatcttacgcagtcattgctggctcctccaaggtcaagttcgacctcaaggtcatagaggcaggtaagtactagcagctacaatccagctaccattctgcttttattttatggttgggataaggctggattattctgagtccaagctaggcccttttgctaatcatgttcatacctcttatcttcctcccacagagaaggcagagcccatgctggcccctgcccctgcccctgctgaggccactggagcccctggagaagccccggccccagccgctgagctgggagaaagtgccccaagtcccaaagggtcaagctcagcagctctcaatggtcctacccctggagcccccgatgaccccattggcctcttcgtgatgcggccacaggatggcgaggtgaccgtgggtggcagcatcaccttctcagcccgcgtggccggcgccagcctcctgaagccgcctgtggtcaagtggttcaagggcaaatgggtggacctgagcagcaaggtgggccagcacctgcagctgcacgacagctacgaccgcgccagcaaggtctatctgttcgagctgcacatcaccgatgcccagcctgccttcactggcagctaccgctgtgaggtgtccaccaaggacaaatttgactgctccaacttcaatctcactgtccacgaggccatgggcaccggagacctggacctcctatcagccttccgccgcacgagcctggctggaggtggtcggcggatcagtgatagccatgaggacactgggattctggacttcagctcactgctgaaaaagagagacagtttccggaccccgagggactcgaagctggaggcaccagcagaggaggacgtgtgggagatcctacggcaggcacccccatctgagtacgagcgcatcgccttccagtacggcgtcactgacctgcgcggcatgctaaagaggctcaagggcatgaggcgcgatgagaagaagagcacagcctttcagaagaagctggagccggcctaccaggtgagcaaaggccacaagatccggctgaccgtggaactggctgaccatgacgctgaggtcaaatggctcaagaatggccaggagatccagatgagcggcagcaagtacatctttgagtccatcggtgccaagcgtaccctgaccatcagccagtgctcattggcggacgacgcagcctaccagtgcgtggtgggtggcgagaagtgtagcacggagctctttgtgaaagagccccctgtgctcatcacgcgccccttggaggaccagctggtgatggtggggcagcgggtggagtttgagtgtgaagtatcggaggagggggcgcaagtcaaatggctgaaggacggggtggagctgacccgggaggagaccttcaaataccggttcaagaaggacgggcagagacaccacctgatcatcaacgaggccatgctggaggacgcggggcactatgcactgtgcactagcgggggccaggcgctggctgagctcattgtgcaggaaaagaagctggaggtgtaccagagcatcgcagacctgatggtgggcgcaaaggaccaggcggtgttcaaatgtgaggtctcagatgagaatgttcggggtgtgtggctgaagaatgggaaggagctggtgcccgacagccgcataaaggtgtcccacatcgggcgggtccacaaactgaccattgacgacgtcacacctgccgacgaggctgactacagctttgtgcccgagggcttcgcctgcaacctgtcagccaagctccacttcatggaggtcaagattgacttcgtacccaggcaggaacctcccaagatccacctggactgcccaggccgcataccagacaccattgtggttgtagctggaaataagctacgtctggacgtccctatctctggggaccctgctcccactgtgatctggcagaaggctatcacgcaggggaataaggccccagccaggccagccccagatgccccagaggacacaggtgacagcgatgagtgggtgtttgacaagaagctgctgtgtgagaccgagggccgggtccgcgtggagaccaccaaggaccgcagcatcttcacggtcgagggggcagagaaggaagatgagggcgtctacacggtcacagtgaagaaccctgtgggcgaggaccaggtcaacctcacagtcaaggtcatcgacgtgccagacgcacctgcggcccccaagatcagcaacgtgggagaggactcctgcacagtacagtgggagccgcctgcctacgatggcgggcagcccatcctgggctacatcctggagcgcaagaagaagaagagctaccggtggatgcggctgaacttcgacctgattcaggagctgagtcatgaagcgcggcgcatgatcgagggcgtggtgtacgagatgcgcgtctacgcggtcaacgccatcggcatgtccaggcccagccctgcctcccagcccttcatgcctatcggtccccccagcgaacccacccacctggcagtagaggacgtctctgacaccacggtctccctcaagtggcggcccccagagcgcgtgggagcaggaggcctggatggctacagcgtggagtactgcccagagggctgctcagagtgggtggctgccctgcaggggctgacagagcacacatcgatactggtgaaggacctgcccacgggggcccggctgcttttccgagtgcgggcacacaatatggcagggcctggagcccctgttaccaccacggagccggtgacagtgcaggagatcctgcaacggccacggcttcagctgcccaggcacctgcgccagaccattcagaagaaggtcggggagcctgtgaaccttctcatccctttccagggcaagccccggcctcaggtgacctggaccaaagaggggcagcccctggcaggcgaggaggtgagcatccgcaacagccccacagacaccatcctgttcatccgggccgctcgccgcgtgcattcaggcacttaccaggtgacggtgcgcattgagaacatggaggacaaggccacgctggtgctgcaggttgttgacaagccaagtcctccccaggatctccgggtgactgacgcctggggtcttaatgtggctctggagtggaagccaccccaggatgtcggcaacacggagctctgggggtacacagtgcagaaagccgacaagaagaccatggagtggttcaccgtcttggagcattaccgccgcacccactgcgtggtgccagagctcatcattggcaatggctactacttccgcgtcttcagccagaatatggttggctttagtgacagagcggccaccaccaaggagcccgtctttatccccagaccaggcatcacctatgagccacccaactataaggccctggacttctccgaggccccaagcttcacccagcccctggtgaaccgctcggtcatcgcgggctacactgctatgctctgctgtgctgtccggggtagccccaagcccaagatttcctggttcaagaatggcctggacctgggagaagacgcccgcttccgcatgttcagcaagcagggagtgttgactctggagattagaaagccctgcccctttgacgggggcatctatgtctgcagggccaccaacttacagggcgaggcacggtgtgagtgccgcctggaggtgcgagtgcctcagtgaaccctggaaggtgccactcccactgtcctttcctaataaaatgaggaaattgcatcgcattgtctgagtaggtgtcattctattctggggggtggggtggggcaggacagcaagggggaggattgggaagacaatagcaggcatgctggggatgcggtgggctctatgggcggccgcaggaacccctagtgatggagttggccactccctctctgcgcgctcgctcgctcactgaggccgcccgggcaaagcccgggcgtcgggcgacctttggtcgcccggcctcagtgagcgagcgagcgcgcag

SEQ ID NO: 137 - DNA, 4969 bp, synthetic construct
  source 1..4969: mol_type = other DNA
ttggccactccctctctgcgcgctcgctcgctcactgaggccgcccgggcaaagcccgggcgtcgggcgacctttggtcgcccggcctcagtgagcgagcgagcgcgcagagagggagtggccaactccatcactaggggttcctgcggccgcctggaagatgtctttacccccagcatcagttcaagtggagcagcacataactcttgccctctgccttccaagattctggtgctgagacttatggagtgtcttggaggttgccttctgccccccaaccctgctcccagctggccctcccaggcctgggttgctggcctctgctttatcaggattctcaagagggacagctggtttatgttgcatgactgttccctgcatatctgctctggttttaaatagcttatctgagcagctggaggaccacatgggcttatatggcgtggggtacatgttcctgtagccttgtccctggcacctgccaaaatagcagccaacaccccccacccccaccgccatccccctgccccacccgtcccctgtcgcacattcctccctccgcagggctggctcaccaggccccagcccacatgcctgcttaaagccctctccatcctctgcctcacccagtccccgctgagactgagcagacgcctccaggatctgtcggcagctgctgttctgagccaccatgcctgagccggggaagaagccagtctcagcttttagcaagaagccacggtcagtggaagtggccgcaggcagccctgccgtgttcgaggccgagacagagcgggcaggagtgaaggtgcgctggcagcgcggaggcagtgacatcagcgccagcaacaagtacggcctggccacagagggcacacggcatacgctgacagtgcgggaagtgggccctgccgaccagggatcttacgcagtcattgctggctcctccaaggtcaagttcgacctcaaggtcatagaggcaggtaagtactagcagctacaatccagctaccattctgcttttattttatggttgggataaggctggattattctgagtccaagctaggcccttttgctaatcatgttcatacctcttatcttcctcccacagagaaggcagagcccatgctggcccctgcccctgcccctgctgaggccactggagcccctggagaagccccggccccagccgctgagctgggagaaagtgccccaagtcccaaagggtcaagctcagcagctctcaatggtcctacccctggagcccccgatgaccccattggcctcttcgtgatgcggccacaggatggcgaggtgaccgtgggtggcagcatcaccttctcagcccgcgtggccggcgccagcctcctgaagccgcctgtggtcaagtggttcaagggcaaatgggtggacctgagcagcaaggtgggccagcacctgcagctgcacgacagctacgaccgcgccagcaaggtctatctgttcgagctgcacatcaccgatgcccagcctgccttcactggcagctaccgctgtgaggtgtccaccaaggacaaatttgactgctccaacttcaatctcactgtccacgaggccatgggcaccggagacctggacctcctatcagccttccgccgcacgagcctggctggaggtggtcggcggatcagtgatagccatgaggacactgggattctggacttcagctcactgctgaaaaagagagacagtttccggaccccgagggactcgaagctggaggcaccagcagaggaggacgtgtgggagatcctacggcaggcacccccatctgagtacgagcgcatcgccttccagtacggcgtcactgacctgcgcggcatgctaaagaggctcaagggcatgaggcgcgatgagaagaagagcacagcctttcagaagaagctggagccggcctaccaggtgagcaaaggccacaagatccggctgaccgtggaactggctgaccatgacgctgaggtcaaatggctcaagaatggccaggagatccagatgagcggcagcaagtacatctttgagtccatcggtgccaagcgtaccctgaccatcagccagtgctcattggcggacgacgcagcctaccagtgcgtggtgggtggcgagaagtgtagcacggagctctttgtgaaagagccccctgtgctcatcacgcgccccttggaggaccagctggtgatggtggggcagcgggtggagtttgagtgtgaagtatcggaggagggggcgcaagtcaaatggctgaaggacggggtggagctgacccgggaggagaccttcaaataccggttcaagaaggacgggcagagacaccacctgatcatcaacgaggccatgctggaggacgcggggcactatgcactgtgcactagcgggggccaggcgctggctgagctcattgtgcaggaaaagaagctggaggtgtaccagagcatcgcagacctgatggtgggcgcaaaggaccaggcggtgttcaaatgtgaggtctcagatgagaatgttcggggtgtgtggctgaagaatgggaaggagctggtgcccgacagccgcataaaggtgtcccacatcgggcgggtccacaaactgaccattgacgacgtcacacctgccgacgaggctgactacagctttgtgcccgagggcttcgcctgcaacctgtcagccaagctccacttcatggaggtcaagattgacttcgtacccaggcaggaacctcccaagatccacctggactgcccaggccgcataccagacaccattgtggttgtagctggaaataagctacgtctggacgtccctatctctggggaccctgctcccactgtgatctggcagaaggctatcacgcaggggaataaggccccagccaggccagccccagatgccccagaggacacaggtgacagcgatgagtgggtgtttgacaagaagctgctgtgtgagaccgagggccgggtccgcgtggagaccaccaaggaccgcagcatcttcacggtcgagggggcagagaaggaagatgagggcgtctacacggtcacagtgaagaaccctgtgggcgaggaccaggtcaacctcacagtcaaggtcatcgacgtgccagacgcacctgcggcccccaagatcagcaacgtgggagaggactcctgcacagtacagtgggagccgcctgcctacgatggcgggcagcccatcctgggctacatcctggagcgcaagaagaagaagagctaccggtggatgcggctgaacttcgacctgattcaggagctgagtcatgaagcgcggcgcatgatcgagggcgtggtgtacgagatgcgcgtctacgcggtcaacgccatcggcatgtccaggcccagccctgcctcccagcccttcatgcctatcggtccccccagcgaacccacccacctggcagtagaggacgtctctgacaccacggtctccctcaagtggcggcccccagagcgcgtgggagcaggaggcctggatggctacagcgtggagtactgcccagagggctgctcagagtgggtggctgccctgcaggggctgacagagcacacatcgatactggtgaaggacctgcccacgggggcccggctgcttttccgagtgcgggcacacaatatggcagggcctggagcccctgttaccaccacggagccggtgacagtgcaggagatcctgcaacggccacggcttcagctgcccaggcacctgcgccagaccattcagaagaaggtcggggagcctgtgaaccttctcatccctttccagggcaagccccggcctcaggtgacctggaccaaagaggggcagcccctggcaggcgaggaggtgagcatccgcaacagccccacagacaccatcctgttcatccgggccgctcgccgcgtgcattcaggcacttaccaggtgacggtgcgcattgagaacatggaggacaaggccacgctggtgctgcaggttgttgacaagccaagtcctccccaggatctccgggtgactgacgcctggggtcttaatgtggctctggagtggaagccaccccaggatgtcggcaacacggagctctgggggtacacagtgcagaaagccgacaagaagaccatggagtggttcaccgtcttggagcattaccgccgcacccactgcgtggtgccagagctcatcattggcaatggctactacttccgcgtcttcagccagaatatggttggctttagtgacagagcggccaccaccaaggagcccgtctttatccccagaccaggcatcacctatgagccacccaactataaggccctggacttctccgaggccccaagcttcacccagcccctggtgaaccgctcggtcatcgcgggctacactgctatgctctgctgtgctgtccggggtagccccaagcccaagatttcctggttcaagaatggcctggacctgggagaagacgcccgcttccgcatgttcagcaagcagggagtgttgactctggagattagaaagccctgcccctttgacgggggcatctatgtctgcagggccaccaacttacagggcgaggcacggtgtgagtgccgcctggaggtgcgagtgcctcagtgaaccctggaaggtgccactcccactgtcctttcctaataaaatgaggaaattgcatcgcattgtctgagtaggtgtcattctattctggggggtggggtggggcaggacagcaagggggaggattgggaagacaatagcaggcatgctggggatgcggtgggctctatgggcggccgcaggaacccctagtgatggagttggccactccctctctgcgcgctcgctcgctcactgaggccgcccgggcaaagcccgggcgtcgggcgacctttggtcgcccggcctcagtgagcgagcgagcgcgcagagagggagtggccaa

SEQ ID NO: 138 - DNA, 4939 bp, synthetic construct
  source 1..4939: mol_type = other DNA
ctgcgcgctcgctcgctcactgaggccgggcgaccaaaggtcgcccgacgcccgggctttgcccgggcggcctcagtgagcgagcgagcgcgcagagagggagtggccaactccatcactaggggttcctgcggccgcctggaagatgtctttacccccagcatcagttcaagtggagcagcacataactcttgccctctgccttccaagattctggtgctgagacttatggagtgtcttggaggttgccttctgccccccaaccctgctcccagctggccctcccaggcctgggttgctggcctctgctttatcaggattctcaagagggacagctggtttatgttgcatgactgttccctgcatatctgctctggttttaaatagcttatctgagcagctggaggaccacatgggcttatatggcgtggggtacatgttcctgtagccttgtccctggcacctgccaaaatagcagccaacaccccccacccccaccgccatccccctgccccacccgtcccctgtcgcacattcctccctccgcagggctggctcaccaggccccagcccacatgcctgcttaaagccctctccatcctctgcctcacccagtccccgctgagactgagcagacgcctccaggatctgtcggcagctgctgttctgagccaccatgcctgagccggggaagaagccagtctcagcttttagcaagaagccacggtcagtggaagtggccgcaggcagccctgccgtgttcgaggccgagacagagcgggcaggagtgaaggtgcgctggcagcgcggaggcagtgacatcagcgccagcaacaagtacggcctggccacagagggcacacggcatacgctgacagtgcgggaagtgggccctgccgaccagggatcttacgcagtcattgctggctcctccaaggtcaagttcgacctcaaggtcatagaggcaggtaagtactagcagctacaatccagctaccattctgcttttattttatggttgggataaggctggattattctgagtccaagctaggcccttttgctaatcatgttcatacctcttatcttcctcccacagagaaggcagagcccatgctggcccctgcccctgcccctgctgaggccactggagcccctggagaagccccggccccagccgctgagctgggagaaagtgccccaagtcccaaagggtcaagctcagcagctctcaatggtcctacccctggagcccccgatgaccccattggcctcttcgtgatgcggccacaggatggcgaggtgaccgtgggtggcagcatcaccttctcagcccgcgtggccggcgccagcctcctgaagccgcctgtggtcaagtggttcaagggcaaatgggtggacctgagcagcaaggtgggccagcacctgcagctgcacgacagctacgaccgcgccagcaaggtctatctgttcgagctgcacatcaccgatgcccagcctgccttcactggcagctaccgctgtgaggtgtccaccaaggacaaatttgactgctccaacttcaatctcactgtccacgaggccatgggcaccggagacctggacctcctatcagccttccgccgcacgagcctggctggaggtggtcggcggatcagtgatagccatgaggacactgggattctggacttcagctcactgctgaaaaagagagacagtttccggaccccgagggactcgaagctggaggcaccagcagaggaggacgtgtgggagatcctacggcaggcacccccatctgagtacgagcgcatcgccttccagtacggcgtcactgacctgcgcggcatgctaaagaggctcaagggcatgaggcgcgatgagaagaagagcacagcctttcagaagaagctggagccggcctaccaggtgagcaaaggccacaagatccggctgaccgtggaactggctgaccatgacgctgaggtcaaatggctcaagaatggccaggagatccagatgagcggcagcaagtacatctttgagtccatcggtgccaagcgtaccctgaccatcagccagtgctcattggcggacgacgcagcctaccagtgcgtggtgggtggcgagaagtgtagcacggagctctttgtgaaagagccccctgtgctcatcacgcgccccttggaggaccagctggtgatggtggggcagcgggtggagtttgagtgtgaagtatcggaggagggggcgcaagtcaaatggctgaaggacggggtggagctgacccgggaggagaccttcaaataccggttcaagaaggacgggcagagacaccacctgatcatcaacgaggccatgctggaggacgcggggcactatgcactgtgcactagcgggggccaggcgctggctgagctcattgtgcaggaaaagaagctggaggtgtaccagagcatcgcagacctgatggtgggcgcaaaggaccaggcggtgttcaaatgtgaggtctcagatgagaatgttcggggtgtgtggctgaagaatgggaaggagctggtgcccgacagccgcataaaggtgtcccacatcgggcgggtccacaaactgaccattgacgacgtcacacctgccgacgaggctgactacagctttgtgcccgagggcttcgcctgcaacctgtcagccaagctccacttcatggaggtcaagattgacttcgtacccaggcaggaacctcccaagatccacctggactgcccaggccgcataccagacaccattgtggttgtagctggaaataagctacgtctggacgtccctatctctggggaccctgctcccactgtgatctggcagaaggctatcacgcaggggaataaggccccagccaggccagccccagatgccccagaggacacaggtgacagcgatgagtgggtgtttgacaagaagctgctgtgtgagaccgagggccgggtccgcgtggagaccaccaaggaccgcagcatcttcacggtcgagggggcagagaaggaagatgagggcgtctacacggtcacagtgaagaaccctgtgggcgaggaccaggtcaacctcacagtcaaggtcatcgacgtgccagacgcacctgcggcccccaagatcagcaacgtgggagaggactcctgcacagtacagtgggagccgcctgcctacgatggcgggcagcccatcctgggctacatcctggagcgcaagaagaagaagagctaccggtggatgcggctgaacttcgacctgattcaggagctgagtcatgaagcgcggcgcatgatcgagggcgtggtgtacgagatgcgcgtctacgcggtcaacgccatcggcatgtccaggcccagccctgcctcccagcccttcatgcctatcggtccccccagcgaacccacccacctggcagtagaggacgtctctgacaccacggtctccctcaagtggcggcccccagagcgcgtgggagcaggaggcctggatggctacagcgtggagtactgcccagagggctgctcagagtgggtggctgccctgcaggggctgacagagcacacatcgatactggtgaaggacctgcccacgggggcccggctgcttttccgagtgcgggcacacaatatggcagggcctggagcccctgttaccaccacggagccggtgacagtgcaggagatcctgcaacggccacggcttcagctgcccaggcacctgcgccagaccattcagaagaaggtcggggagcctgtgaaccttctcatccctttccagggcaagccccggcctcaggtgacctggaccaaagaggggcagcccctggcaggcgaggaggtgagcatccgcaacagccccacagacaccatcctgttcatccgggccgctcgccgcgtgcattcaggcacttaccaggtgacggtgcgcattgagaacatggaggacaaggccacgctggtgctgcaggttgttgacaagccaagtcctccccaggatctccgggtgactgacgcctggggtcttaatgtggctctggagtggaagccaccccaggatgtcggcaacacggagctctgggggtacacagtgcagaaagccgacaagaagaccatggagtggttcaccgtcttggagcattaccgccgcacccactgcgtggtgccagagctcatcattggcaatggctactacttccgcgtcttcagccagaatatggttggctttagtgacagagcggccaccaccaaggagcccgtctttatccccagaccaggcatcacctatgagccacccaactataaggccctggacttctccgaggccccaagcttcacccagcccctggtgaaccgctcggtcatcgcgggctacactgctatgctctgctgtgctgtccggggtagccccaagcccaagatttcctggttcaagaatggcctggacctgggagaagacgcccgcttccgcatgttcagcaagcagggagtgttgactctggagattagaaagccctgcccctttgacgggggcatctatgtctgcagggccaccaacttacagggcgaggcacggtgtgagtgccgcctggaggtgcgagtgcctcagtgaaccctggaaggtgccactcccactgtcctttcctaataaaatgaggaaattgcatcgcattgtctgagtaggtgtcattctattctggggggtggggtggggcaggacagcaagggggaggattgggaagacaatagcaggcatgctggggatgcggtgggctctatgggcggccgcaggaacccctagtgatggagttggccactccctctctgcgcgctcgctcgctcactgaggccgggcgaccaaaggtcgcccgacgcccgggctttgcccgggcggcctcagtgagcgagcgagcgcgcag

SEQ ID NO: 139 - DNA, 4969 bp, synthetic construct
  source 1..4969: mol_type = other DNA
ttggccactccctctctgcgcgctcgctcgctcactgaggccgggcgaccaaaggtcgcccgacgcccgggctttgcccgggcggcctcagtgagcgagcgagcgcgcagagagggagtggccaactccatcactaggggttcctgcggccgcctggaagatgtctttacccccagcatcagttcaagtggagcagcacataactcttgccctctgccttccaagattctggtgctgagacttatggagtgtcttggaggttgccttctgccccccaaccctgctcccagctggccctcccaggcctgggttgctggcctctgctttatcaggattctcaagagggacagctggtttatgttgcatgactgttccctgcatatctgctctggttttaaatagcttatctgagcagctggaggaccacatgggcttatatggcgtggggtacatgttcctgtagccttgtccctggcacctgccaaaatagcagccaacaccccccacccccaccgccatccccctgccccacccgtcccctgtcgcacattcctccctccgcagggctggctcaccaggccccagcccacatgcctgcttaaagccctctccatcctctgcctcacccagtccccgctgagactgagcagacgcctccaggatctgtcggcagctgctgttctgagccaccatgcctgagccggggaagaagccagtctcagcttttagcaagaagccacggtcagtggaagtggccgcaggcagccctgccgtgttcgaggccgagacagagcgggcaggagtgaaggtgcgctggcagcgcggaggcagtgacatcagcgccagcaacaagtacggcctggccacagagggcacacggcatacgctgacagtgcgggaagtgggccctgccgaccagggatcttacgcagtcattgctggctcctccaaggtcaagttcgacctcaaggtcatagaggcaggtaagtactagcagctacaatccagctaccattctgcttttattttatggttgggataaggctggattattctgagtccaagctaggcccttttgctaatcatgttcatacctcttatcttcctcccacagagaaggcagagcccatgctggcccctgcccctgcccctgctgaggccactggagcccctggagaagccccggccccagccgctgagctgggagaaagtgccccaagtcccaaagggtcaagctcagcagctctcaatggtcctacccctggagcccccgatgaccccattggcctcttcgtgatgcggccacaggatggcgaggtgaccgtgggtggcagcatcaccttctcagcccgcgtggccggcgccagcctcctgaagccgcctgtggtcaagtggttcaagggcaaatgggtggacctgagcagcaaggtgggccagcacctgcagctgcacgacagctacgaccgcgccagcaaggtctatctgttcgagctgcacatcaccgatgcccagcctgccttcactggcagctaccgctgtgaggtgtccaccaaggacaaatttgactgctccaacttcaatctcactgtccacgaggccatgggcaccggagacctggacctcctatcagccttccgccgcacgagcctggctggaggtggtcggcggatcagtgatagccatgaggacactgggattctggacttcagctcactgctgaaaaagagagacagtttccggaccccgagggactcgaagctggaggcaccagcagaggaggacgtgtgggagatcctacggcaggcacccccatctgagtacgagcgcatcgccttccagtacggcgtcactgacctgcgcggcatgctaaagaggctcaagggcatgaggcgcgatgagaagaagagcacagcctttcagaagaagctggagccggcctaccaggtgagcaaaggccacaagatccggctgaccgtggaactggctgaccatgacgctgaggtcaaatggctcaagaatggccaggagatccagatgagcggcagcaagtacatctttgagtccatcggtgccaagcgtaccctgaccatcagccagtgctcattggcggacgacgcagcctaccagtgcgtggtgggtggcgagaagtgtagcacggagctctttgtgaaagagccccctgtgctcatcacgcgccccttggaggaccagctggtgatggtggggcagcgggtggagtttgagtgtgaagtatcggaggagggggcgcaagtcaaatggctgaaggacggggtggagctgacccgggaggagaccttcaaataccggttcaagaaggacgggcagagacaccacctgatcatcaacgaggccatgctggaggacgcggggcactatgcactgtgcactagcgggggccaggcgctggctgagctcattgtgcaggaaaagaagctggaggtgtaccagagcatcgcagacctgatggtgggcgcaaaggaccaggcggtgttcaaatgtgaggtctcagatgagaatgttcggggtgtgtggctgaagaatgggaaggagctggtgcccgacagccgcataaaggtgtcccacatcgggcgggtccacaaactgaccattgacgacgtcacacctgccgacgaggctgactacagctttgtgcccgagggcttcgcctgcaacctgtcagccaagctccacttcatggaggtcaagattgacttcgtacccaggcaggaacctcccaagatccacctggactgcccaggccgcataccagacaccattgtggttgtagctggaaataagctacgtctggacgtccctatctctggggaccctgctcccactgtgatctggcagaaggctatcacgcaggggaataaggccccagccaggccagccccagatgccccagaggacacaggtgacagcgatgagtgggtgtttgacaagaagctgctgtgtgagaccgagggccgggtccgcgtggagaccaccaaggaccgcagcatcttcacggtcgagggggcagagaaggaagatgagggcgtctacacggtcacagtgaagaaccctgtgggcgaggaccaggtcaacctcacagtcaaggtcatcgacgtgccagacgcacctgcggcccccaagatcagcaacgtgggagaggactcctgcacagtacagtgggagccgcctgcctacgatggcgggcagcccatcctgggctacatcctggagcgcaagaagaagaagagctaccggtggatgcggctgaacttcgacctgattcaggagctgagtcatgaagcgcggcgcatgatcgagggcgtggtgtacgagatgcgcgtctacgcggtcaacgccatcggcatgtccaggcccagccctgcctcccagcccttcatgcctatcggtccccccagcgaacccacccacctggcagtagaggacgtctctgacaccacggtctccctcaagtggcggcccccagagcgcgtgggagcaggaggcctggatggctacagcgtggagtactgcccagagggctgctcagagtgggtggctgccctgcaggggctgacagagcacacatcgatactggtgaaggacctgcccacgggggcccggctgcttttccgagtgcgggcacacaatatggcagggcctggagcccctgttaccaccacggagccggtgacagtgcaggagatcctgcaacggccacggcttcagctgcccaggcacctgcgccagaccattcagaagaaggtcggggagcctgtgaaccttctcatccctttccagggcaagccccggcctcaggtgacctggaccaaagaggggcagcccctggcaggcgaggaggtgagcatccgcaacagccccacagacaccatcctgttcatccgggccgctcgccgcgtgcattcaggcacttaccaggtgacggtgcgcattgagaacatggaggacaaggccacgctggtgctgcaggttgttgacaagccaagtcctccccaggatctccgggtgactgacgcctggggtcttaatgtggctctggagtggaagccaccccaggatgtcggcaacacggagctctgggggtacacagtgcagaaagccgacaagaagaccatggagtggttcaccgtcttggagcattaccgccgcacccactgcgtggtgccagagctcatcattggcaatggctactacttccgcgtcttcagccagaatatggttggctttagtgacagagcggccaccaccaaggagcccgtctttatccccagaccaggcatcacctatgagccacccaactataaggccctggacttctccgaggccccaagcttcacccagcccctggtgaaccgctcggtcatcgcgggctacactgctatgctctgctgtgctgtccggggtagccccaagcccaagatttcctggttcaagaatggcctggacctgggagaagacgcccgcttccgcatgttcagcaagcagggagtgttgactctggagattagaaagccctgcccctttgacgggggcatctatgtctgcagggccaccaacttacagggcgaggcacggtgtgagtgccgcctggaggtgcgagtgcctcagtgaaccctggaaggtgccactcccactgtcctttcctaataaaatgaggaaattgcatcgcattgtctgagtaggtgtcattctattctggggggtggggtggggcaggacagcaagggggaggattgggaagacaatagcaggcatgctggggatgcggtgggctctatgggcggccgcaggaacccctagtgatggagttggccactccctctctgcgcgctcgctcgctcactgaggccgggcgaccaaaggtcgcccgacgcccgggctttgcccgggcggcctcagtgagcgagcgagcgcgcagagagggagtggccaa

SEQ ID NO: 140 - DNA, 4939 bp, synthetic construct
  source 1..4939: mol_type = other DNA
ctgcgcgctcgctcgctcactgaggccgggcgaccaaaggtcgcccgacgcccgggctttgcccgggcggcctcagtgagcgagcgagcgcgcagagagggagtggccaactccatcactaggggttcctgcggccgcagtggagcagcacataactcttgccctctgccttccaagattctggtgctgagacttatggagtgtcttggaggttgccttctgccccccaaccctgctcccagctggccctcccaggcctgggttgctggcctctgctttatcaggattctcaagagggacagctggtttatgttgcatgactgttccctgcatatctgctctggttttaaatagcttatctgagcagctggaggaccacatgggcttatatggcgtggggtacatgttcctgtagccttgtccctggcacctgccaaaatagcagccaacaccccccacccccaccgccatccccctgccccacccgtcccctgtcgcacattcctccctccgcagggctggctcaccaggccccagcccacatgcctgcttaaagccctctccatcctctgcctcacccagtccccgctgagactgagcagacgcctccaggatctgtcggcagctgctgttctgagccaccatgcctgagccggggaagaagccagtctcagcttttagcaagaagccacggtcagtggaagtggccgcaggcagccctgccgtgttcgaggccgagacagagcgggcaggagtgaaggtgcgctggcagcgcggaggcagtgacatcagcgccagcaacaagtacggcctggccacagagggcacacggcatacgctgacagtgcgggaagtgggccctgccgaccagggatcttacgcagtcattgctggctcctccaaggtcaagttcgacctcaaggtcatagaggcaggtaagtactagcagctacaatccagctaccattctgcttttattttatggttgggataaggctggattattctgagtccaagctaggcccttttgctaatcatgttcatacctcttatcttcctcccacagagaaggcagagcccatgctggcccctgcccctgcccctgctgaggccactggagcccctggagaagccccggccccagccgctgagctgggagaaagtgccccaagtcccaaagggtcaagctcagcagctctcaatggtcctacccctggagcccccgatgaccccattggcctcttcgtgatgcggccacaggatggcgaggtgaccgtgggtggcagcatcaccttctcagcccgcgtggccggcgccagcctcctgaagccgcctgtggtcaagtggttcaagggcaaatgggtggacctgagcagcaaggtgggccagcacctgcagctgcacgacagctacgaccgcgccagcaaggtctatctgttcgagctgcacatcaccgatgcccagcctgccttcactggcagctaccgctgtgaggtgtccaccaaggacaaatttgactgctccaacttcaatctcactgtccacgaggccatgggcaccggagacctggacctcctatcagccttccgccgcacgagcctggctggaggtggtcggcggatcagtgatagccatgaggacactgggattctggacttcagctcactgctgaaaaagagagacagtttccggaccccgagggactcgaagctggaggcaccagcagaggaggacgtgtgggagatcctacggcaggcacccccatctgagtacgagcgcatcgccttccagtacggcgtcactgacctgcgcggcatgctaaagaggctcaagggcatgaggcgcgatgagaagaagagcacagcctttcagaagaagctggagccggcctaccaggtgagcaaaggccacaagatccggctgaccgtggaactggctgaccatgacgctgaggtcaaatggctcaagaatggccaggagatccagatgagcggcagcaagtacatctttgagtccatcggtgccaagcgtaccctgaccatcagccagtgctcattggcggacgacgcagcctaccagtgcgtggtgggtggcgagaagtgtagcacggagctctttgtgaaagagccccctgtgctcatcacgcgccccttggaggaccagctggtgatggtggggcagcgggtggagtttgagtgtgaagtatcggaggagggggcgcaagtcaaatggctgaaggacggggtggagctgacccgggaggagaccttcaaataccggttcaagaaggacgggcagagacaccacctgatcatcaacgaggccatgctggaggacgcggggcactatgcactgtgcactagcgggggccaggcgctggctgagctcattgtgcaggaaaagaagctggaggtgtaccagagcatcgcagacctgatggtgggcgcaaaggaccaggcggtgttcaaatgtgaggtctcagatgagaatgttcggggtgtgtggctgaagaatgggaaggagctggtgcccgacagccgcataaaggtgtcccacatcgggcgggtccacaaactgaccattgacgacgtcacacctgccgacgaggctgactacagctttgtgcccgagggcttcgcctgcaacctgtcagccaagctccacttcatggaggtcaagattgacttcgtacccaggcaggaacctcccaagatccacctggactgcccaggccgcataccagacaccattgtggttgtagctggaaataagctacgtctggacgtccctatctctggggaccctgctcccactgtgatctggcagaaggctatcacgcaggggaataaggccccagccaggccagccccagatgccccagaggacacaggtgacagcgatgagtgggtgtttgacaagaagctgctgtgtgagaccgagggccgggtccgcgtggagaccaccaaggaccgcagcatcttcacggtcgagggggcagagaaggaagatgagggcgtctacacggtcacagtgaagaaccctgtgggcgaggaccaggtcaacctcacagtcaaggtcatcgacgtgccagacgcacctgcggcccccaagatcagcaacgtgggagaggactcctgcacagtacagtgggagccgcctgcctacgatggcgggcagcccatcctgggctacatcctggagcgcaagaagaagaagagctaccggtggatgcggctgaacttcgacctgattcaggagctgagtcatgaagcgcggcgcatgatcgagggcgtggtgtacgagatgcgcgtctacgcggtcaacgccatcggcatgtccaggcccagccctgcctcccagcccttcatgcctatcggtccccccagcgaacccacccacctggcagtagaggacgtctctgacaccacggtctccctcaagtggcggcccccagagcgcgtgggagcaggaggcctggatggctacagcgtggagtactgcccagagggctgctcagagtgggtggctgccctgcaggggctgacagagcacacatcgatactggtgaaggacctgcccacgggggcccggctgcttttccgagtgcgggcacacaatatggcagggcctggagcccctgttaccaccacggagccggtgacagtgcaggagatcctgcaacggccacggcttcagctgcccaggcacctgcgccagaccattcagaagaaggtcggggagcctgtgaaccttctcatccctttccagggcaagccccggcctcaggtgacctggaccaaagaggggcagcccctggcaggcgaggaggtgagcatccgcaacagccccacagacaccatcctgttcatccgggccgctcgccgcgtgcattcaggcacttaccaggtgacggtgcgcattgagaacatggaggacaaggccacgctggtgctgcaggttgttgacaagccaagtcctccccaggatctccgggtgactgacgcctggggtcttaatgtggctctggagtggaagccaccccaggatgtcggcaacacggagctctgggggtacacagtgcagaaagccgacaagaagaccatggagtggttcaccgtcttggagcattaccgccgcacccactgcgtggtgccagagctcatcattggcaatggctactacttccgcgtcttcagccagaatatggttggctttagtgacagagcggccaccaccaaggagcccgtctttatccccagaccaggcatcacctatgagccacccaactataaggccctggacttctccgaggccccaagcttcacccagcccctggtgaaccgctcggtcatcgcgggctacactgctatgctctgctgtgctgtccggggtagccccaagcccaagatttcctggttcaagaatggcctggacctgggagaagacgcccgcttccgcatgttcagcaagcagggagtgttgactctggagattagaaagccctgcccctttgacgggggcatctatgtctgcagggccaccaacttacagggcgaggcacggtgtgagtgccgcctggaggtgcgagtgcctcagtgatctgttgtttgcccctcccccgtgccttccttgaccctggaaggtgccactcccactgtcctttcctaataaaatgaggaaattgcatcgcattgtctgagtaggtgtcattctattctggggggtggggtggggcaggacagcaagggggaggattgggaagacaatagcaggcatgctggggatgcggtgggctctatgggcggccgcaggaacccctagtgatggagttggccactccctctctgcgcgctcgctcgctcactgaggccgcccgggcaaagcccgggcgtcgggcgacctttggtcgcccggcctcagtgagcgagcgagcgcgcag

SEQ ID NO: 141 - DNA, 4969 bp, synthetic construct
  source 1..4969: mol_type = other DNA
ttggccactccctctctgcgcgctcgctcgctcactgaggccgggcgaccaaaggtcgcccgacgcccgggctttgcccgggcggcctcagtgagcgagcgagcgcgcagagagggagtggccaactccatcactaggggttcctgcggccgcagtggagcagcacataactcttgccctctgccttccaagattctggtgctgagacttatggagtgtcttggaggttgccttctgccccccaaccctgctcccagctggccctcccaggcctgggttgctggcctctgctttatcaggattctcaagagggacagctggtttatgttgcatgactgttccctgcatatctgctctggttttaaatagcttatctgagcagctggaggaccacatgggcttatatggcgtggggtacatgttcctgtagccttgtccctggcacctgccaaaatagcagccaacaccccccacccccaccgccatccccctgccccacccgtcccctgtcgcacattcctccctccgcagggctggctcaccaggccccagcccacatgcctgcttaaagccctctccatcctctgcctcacccagtccccgctgagactgagcagacgcctccaggatctgtcggcagctgctgttctgagccaccatgcctgagccggggaagaagccagtctcagcttttagcaagaagccacggtcagtggaagtggccgcaggcagccctgccgtgttcgaggccgagacagagcgggcaggagtgaaggtgcgctggcagcgcggaggcagtgacatcagcgccagcaacaagtacggcctggccacagagggcacacggcatacgctgacagtgcgggaagtgggccctgccgaccagggatcttacgcagtcattgctggctcctccaaggtcaagttcgacctcaaggtcatagaggcaggtaagtactagcagctacaatccagctaccattctgcttttattttatggttgggataaggctggattattctgagtccaagctaggcccttttgctaatcatgttcatacctcttatcttcctcccacagagaaggcagagcccatgctggcccctgcccctgcccctgctgaggccactggagcccctggagaagccccggccccagccgctgagctgggagaaagtgccccaagtcccaaagggtcaagctcagcagctctcaatggtcctacccctggagcccccgatgaccccattggcctcttcgtgatgcggccacaggatggcgaggtgaccgtgggtggcagcatcaccttctcagcccgcgtggccggcgccagcctcctgaagccgcctgtggtcaagtggttcaagggcaaatgggtggacctgagcagcaaggtgggccagcacctgcagctgcacgacagctacgaccgcgccagcaaggtctatctgttcgagctgcacatcaccgatgcccagcctgccttcactggcagctaccgctgtgaggtgtccaccaaggacaaatttgactgctccaacttcaatctcactgtccacgaggccatgggcaccggagacctggacctcctatcagccttccgccgcacgagcctggctggaggtggtcggcggatcagtgatagccatgaggacactgggattctggacttcagctcactgctgaaaaagagagacagtttccggaccccgagggactcgaagctggaggcaccagcagaggaggacgtgtgggagatcctacggcaggcacccccatctgagtacgagcgcatcgccttccagtacggcgtcactgacctgcgcggcatgctaaagaggctcaagggcatgaggcgcgatgagaagaagagcacagcctttcagaagaagctggagccggcctaccaggtgagcaaaggccacaagatccggctgaccgtggaactggctgaccatgacgctgaggtcaaatggctcaagaatggccaggagatccagatgagcggcagcaagtacatctttgagtccatcggtgccaagcgtaccctgaccatcagccagtgctcattggcggacgacgcagcctaccagtgcgtggtgggtggcgagaagtgtagcacggagctctttgtgaaagagccccctgtgctcatcacgcgccccttggaggaccagctggtgatggtggggcagcgggtggagtttgagtgtgaagtatcggaggagggggcgcaagtcaaatggctgaaggacggggtggagctgacccgggaggagaccttcaaataccggttcaagaaggacgggcagagacaccacctgatcatcaacgaggccatgctggaggacgcggggcactatgcactgtgcactagcgggggccaggcgctggctgagctcattgtgcaggaaaagaagctggaggtgtaccagagcatcgcagacctgatggtgggcgcaaaggaccaggcggtgttcaaatgtgaggtctcagatgagaatgttcggggtgtgtggctgaagaatgggaaggagctggtgcccgacagccgcataaaggtgtcccacatcgggcgggtccacaaactgaccattgacgacgtcacacctgccgacgaggctgactacagctttgtgcccgagggcttcgcctgcaacctgtcagccaagctccacttcatggaggtcaagattgacttcgtacccaggcaggaacctcccaagatccacctggactgcccaggccgcataccagacaccattgtggttgtagctggaaataagctacgtctggacgtccctatctctggggaccctgctcccactgtgatctggcagaaggctatcacgcaggggaataaggccccagccaggccagccccagatgccccagaggacacaggtgacagcgatgagtgggtgtttgacaagaagctgctgtgtgagaccgagggccgggtccgcgtggagaccaccaaggaccgcagcatcttcacggtcgagggggcagagaaggaagatgagggcgtctacacggtcacagtgaagaaccctgtgggcgaggaccaggtcaacctcacagtcaaggtcatcgacgtgccagacgcacctgcggcccccaagatcagcaacgtgggagaggactcctgcacagtacagtgggagccgcctgcctacgatggcgggcagcccatcctgggctacatcctggagcgcaagaagaagaagagctaccggtggatgcggctgaacttcgacctgattcaggagctgagtcatgaagcgcggcgcatgatcgagggcgtggtgtacgagatgcgcgtctacgcggtcaacgccatcggcatgtccaggcccagccctgcctcccagcccttcatgcctatcggtccccccagcgaacccacccacctggcagtagaggacgtctctgacaccacggtctccctcaagtggcggcccccagagcgcgtgggagcaggaggcctggatggctacagcgtggagtactgcccagagggctgctcagagtgggtggctgccctgcaggggctgacagagcacacatcgatactggtgaaggacctgcccacgggggcccggctgcttttccgagtgcgggcacacaatatggcagggcctggagcccctgttaccaccacggagccggtgacagtgcaggagatcctgcaacggccacggcttcagctgcccaggcacctgcgccagaccattcagaagaaggtcggggagcctgtgaaccttctcatccctttccagggcaagccccggcctcaggtgacctggaccaaagaggggcagcccctggcaggcgaggaggtgagcatccgcaacagccccacagacaccatcctgttcatccgggccgctcgccgcgtgcattcaggcacttaccaggtgacggtgcgcattgagaacatggaggacaaggccacgctggtgctgcaggttgttgacaagccaagtcctccccaggatctccgggtgactgacgcctggggtcttaatgtggctctggagtggaagccaccccaggatgtcggcaacacggagctctgggggtacacagtgcagaaagccgacaagaagaccatggagtggttcaccgtcttggagcattaccgccgcacccactgcgtggtgccagagctcatcattggcaatggctactacttccgcgtcttcagccagaatatggttggctttagtgacagagcggccaccaccaaggagcccgtctttatccccagaccaggcatcacctatgagccacccaactataaggccctggacttctccgaggccccaagcttcacccagcccctggtgaaccgctcggtcatcgcgggctacactgctatgctctgctgtgctgtccggggtagccccaagcccaagatttcctggttcaagaatggcctggacctgggagaagacgcccgcttccgcatgttcagcaagcagggagtgttgactctggagattagaaagccctgcccctttgacgggggcatctatgtctgcagggccaccaacttacagggcgaggcacggtgtgagtgccgcctggaggtgcgagtgcctcagtgatctgttgtttgcccctcccccgtgccttccttgaccctggaaggtgccactcccactgtcctttcctaataaaatgaggaaattgcatcgcattgtctgagtaggtgtcattctattctggggggtggggtggggcaggacagcaagggggaggattgggaagacaatagcaggcatgctggggatgcggtgggctctatgggcggccgcaggaacccctagtgatggagttggccactccctctctgcgcgctcgctcgctcactgaggccgcccgggcaaagcccgggcgtcgggcgacctttggtcgcccggcctcagtgagcgagcgagcgcgcagagagggagtggccaa

SEQ ID NO: 142 - DNA, 4939 bp, synthetic construct
  source 1..4939: mol_type = other DNA
ctgcgcgctcgctcgctcactgaggccgcccgggcaaagcccgggcgtcgggcgacctttggtcgcccggcctcagtgagcgagcgagcgcgcagagagggagtggccaactccatcactaggggttcctgcggccgcagtggagcagcacataactcttgccctctgccttccaagattctggtgctgagacttatggagtgtcttggaggttgccttctgccccccaaccctgctcccagctggccctcccaggcctgggttgctggcctctgctttatcaggattctcaagagggacagctggtttatgttgcatgactgttccctgcatatctgctctggttttaaatagcttatctgagcagctggaggaccacatgggcttatatggcgtggggtacatgttcctgtagccttgtccctggcacctgccaaaatagcagccaacaccccccacccccaccgccatccccctgccccacccgtcccctgtcgcacattcctccctccgcagggctggctcaccaggccccagcccacatgcctgcttaaagccctctccatcctctgcctcacccagtccccgctgagactgagcagacgcctccaggatctgtcggcagctgctgttctgagccaccatgcctgagccggggaagaagccagtctcagcttttagcaagaagccacggtcagtggaagtggccgcaggcagccctgccgtgttcgaggccgagacagagcgggcaggagtgaaggtgcgctggcagcgcggaggcagtgacatcagcgccagcaacaagtacggcctggccacagagggcacacggcatacgctgacagtgcgggaagtgggccctgccgaccagggatcttacgcagtcattgctggctcctccaaggtcaagttcgacctcaaggtcatagaggcaggtaagtactagcagctacaatccagctaccattctgcttttattttatggttgggataaggctggattattctgagtccaagctaggcccttttgctaatcatgttcatacctcttatcttcctcccacagagaaggcagagcccatgctggcccctgcccctgcccctgctgaggccactggagcccctggagaagccccggccccagccgctgagctgggagaaagtgccccaagtcccaaagggtcaagctcagcagctctcaatggtcctacccctggagcccccgatgaccccattggcctcttcgtgatgcggccacaggatggcgaggtgaccgtgggtggcagcatcaccttctcagcccgcgtggccggcgccagcctcctgaagccgcctgtggtcaagtggttcaagggcaaatgggtggacctgagcagcaaggtgggccagcacctgcagctgcacgacagctacgaccgcgccagcaaggtctatctgttcgagctgcacatcaccgatgcccagcctgccttcactggcagctaccgctgtgaggtgtccaccaaggacaaatttgactgctccaacttcaatctcactgtccacgaggccatgggcaccggagacctggacctcctatcagccttccgccgcacgagcctggctggaggtggtcggcggatcagtgatagccatgaggacactgggattctggacttcagctcactgctgaaaaagagagacagtttccggaccccgagggactcgaagctggaggcaccagcagaggaggacgtgtgggagatcctacggcaggcacccccatctgagtacgagcgcatcgccttccagtacggcgtcactgacctgcgcggcatgctaaagaggctcaagggcatgaggcgcgatgagaagaagagcacagcctttcagaagaagctggagccggcctaccaggtgagcaaaggccacaagatccggctgaccgtggaactggctgaccatgacgctgaggtcaaatggctcaagaatggccaggagatccagatgagcggcagcaagtacatctttgagtccatcggtgccaagcgtaccctgaccatcagccagtgctcattggcggacgacgcagcctaccagtgcgtggtgggtggcgagaagtgtagcacggagctctttgtgaaagagccccctgtgctcatcacgcgccccttggaggaccagctggtgatggtggggcagcgggtggagtttgagtgtgaagtatcggaggagggggcgcaagtcaaatggctgaaggacggggtggagctgacccgggaggagaccttcaaataccggttcaagaaggacgggcagagacaccacctgatcatcaacgaggccatgctggaggacgcggggcactatgcactgtgcactagcgggggccaggcgctggctgagctcattgtgcaggaaaagaagctggaggtgtaccagagcatcgcagacctgatggtgggcgcaaaggaccaggcggtgttcaaatgtgaggtctcagatgagaatgttcggggtgtgtggctgaagaatgggaaggagctggtgcccgacagccgcataaaggtgtcccacatcgggcgggtccacaaactgaccattgacgacgtcacacctgccgacgaggctgactacagctttgtgcccgagggcttcgcctgcaacctgtcagccaagctccacttcatggaggtcaagattgacttcgtacccaggcaggaacctcccaagatccacctggactgcccaggccgcataccagacaccattgtggttgtagctggaaataagctacgtctggacgtccctatctctggggaccctgctcccactgtgatctggcagaaggctatcacgcaggggaataaggccccagccaggccagccccagatgccccagaggacacaggtgacagcgatgagtgggtgtttgacaagaagctgctgtgtgagaccgagggccgggtccgcgtggagaccaccaaggaccgcagcatcttcacggtcgagggggcagagaaggaagatgagggcgtctacacggtcacagtgaagaaccctgtgggcgaggaccaggtcaacctcacagtcaaggtcatcgacgtgccagacgcacctgcggcccccaagatcagcaacgtgggagaggactcctgcacagtacagtgggagccgcctgcctacgatggcgggcagcccatcctgggctacatcctggagcgcaagaagaagaagagctaccggtggatgcggctgaacttcgacctgattcaggagctgagtcatgaagcgcggcgcatgatcgagggcgtggtgtacgagatgcgcgtctacgcggtcaacgccatcggcatgtccaggcccagccctgcctcccagcccttcatgcctatcggtccccccagcgaacccacccacctggcagtagaggacgtctctgacaccacggtctccctcaagtggcggcccccagagcgcgtgggagcaggaggcctggatggctacagcgtggagtactgcccagagggctgctcagagtgggtggctgccctgcaggggctgacagagcacacatcgatactggtgaaggacctgcccacgggggcccggctgcttttccgagtgcgggcacacaatatggcagggcctggagcccctgttaccaccacggagccggtgacagtgcaggagatcctgcaacggccacggcttcagctgcccaggcacctgcgccagaccattcagaagaaggtcggggagcctgtgaaccttctcatccctttccagggcaagccccggcctcaggtgacctggaccaaagaggggcagcccctggcaggcgaggaggtgagcatccgcaacagccccacagacaccatcctgttcatccgggccgctcgccgcgtgcattcaggcacttaccaggtgacggtgcgcattgagaacatggaggacaaggccacgctggtgctgcaggttgttgacaagccaagtcctccccaggatctccgggtgactgacgcctggggtcttaatgtggctctggagtggaagccaccccaggatgtcggcaacacggagctctgggggtacacagtgcagaaagccgacaagaagaccatggagtggttcaccgtcttggagcattaccgccgcacccactgcgtggtgccagagctcatcattggcaatggctactacttccgcgtcttcagccagaatatggttggctttagtgacagagcggccaccaccaaggagcccgtctttatccccagaccaggcatcacctatgagccacccaactataaggccctggacttctccgaggccccaagcttcacccagcccctggtgaaccgctcggtcatcgcgggctacactgctatgctctgctgtgctgtccggggtagccccaagcccaagatttcctggttcaagaatggcctggacctgggagaagacgcccgcttccgcatgttcagcaagcagggagtgttgactctggagattagaaagccctgcccctttgacgggggcatctatgtctgcagggccaccaacttacagggcgaggcacggtgtgagtgccgcctggaggtgcgagtgcctcagtgatctgttgtttgcccctcccccgtgccttccttgaccctggaaggtgccactcccactgtcctttcctaataaaatgaggaaattgcatcgcattgtctgagtaggtgtcattctattctggggggtggggtggggcaggacagcaagggggaggattgggaagacaatagcaggcatgctggggatgcggtgggctctatgggcggccgcaggaacccctagtgatggagttggccactccctctctgcgcgctcgctcgctcactgaggccgcccgggcaaagcccgggcgtcgggcgacctttggtcgcccggcctcagtgagcgagcgagcgcgcag

SEQ ID NO: 143 - DNA, 4969 bp, synthetic construct
  source 1..4969: mol_type = other DNA
ttggccactccctctctgcgcgctcgctcgctcactgaggccgcccgggcaaagcccgggcgtcgggcgacctttggtcgcccggcctcagtgagcgagcgagcgcgcagagagggagtggccaactccatcactaggggttcctgcggccgcagtggagcagcacataactcttgccctctgccttccaagattctggtgctgagacttatggagtgtcttggaggttgccttctgccccccaaccctgctcccagctggccctcccaggcctgggttgctggcctctgctttatcaggattctcaagagggacagctggtttatgttgcatgactgttccctgcatatctgctctggttttaaatagcttatctgagcagctggaggaccacatgggcttatatggcgtggggtacatgttcctgtagccttgtccctggcacctgccaaaatagcagccaacaccccccacccccaccgccatccccctgccccacccgtcccctgtcgcacattcctccctccgcagggctggctcaccaggccccagcccacatgcctgcttaaagccctctccatcctctgcctcacccagtccccgctgagactgagcagacgcctccaggatctgtcggcagctgctgttctgagccaccatgcctgagccggggaagaagccagtctcagcttttagcaagaagccacggtcagtggaagtggccgcaggcagccctgccgtgttcgaggccgagacagagcgggcaggagtgaaggtgcgctggcagcgcggaggcagtgacatcagcgccagcaacaagtacggcctggccacagagggcacacggcatacgctgacagtgcgggaagtgggccctgccgaccagggatcttacgcagtcattgctggctcctccaaggtcaagttcgacctcaaggtcatagaggcaggtaagtactagcagctacaatccagctaccattctgcttttattttatggttgggataaggctggattattctgagtccaagctaggcccttttgctaatcatgttcatacctcttatcttcctcccacagagaaggcagagcccatgctggcccctgcccctgcccctgctgaggccactggagcccctggagaagccccggccccagccgctgagctgggagaaagtgccccaagtcccaaagggtcaagctcagcagctctcaatggtcctacccctggagcccccgatgaccccattggcctcttcgtgatgcggccacaggatggcgaggtgaccgtgggtggcagcatcaccttctcagcccgcgtggccggcgccagcctcctgaagccgcctgtggtcaagtggttcaagggcaaatgggtggacctgagcagcaaggtgggccagcacctgcagctgcacgacagctacgaccgcgccagcaaggtctatctgttcgagctgcacatcaccgatgcccagcctgccttcactggcagctaccgctgtgaggtgtccaccaaggacaaatttgactgctccaacttcaatctcactgtccacgaggccatgggcaccggagacctggacctcctatcagccttccgccgcacgagcctggctggaggtggtcggcggatcagtgatagccatgaggacactgggattctggacttcagctcactgctgaaaaagagagacagtttccggaccccgagggactcgaagctggaggcaccagcagaggaggacgtgtgggagatcctacggcaggcacccccatctgagtacgagcgcatcgccttccagtacggcgtcactgacctgcgcggcatgctaaagaggctcaagggcatgaggcgcgatgagaagaagagcacagcctttcagaagaagctggagccggcctaccaggtgagcaaaggccacaagatccggctgaccgtggaactggctgaccatgacgctgaggtcaaatggctcaagaatggccaggagatccagatgagcggcagcaagtacatctttgagtccatcggtgccaagcgtaccctgaccatcagccagtgctcattggcggacgacgcagcctaccagtgcgtggtgggtggcgagaagtgtagcacggagctctttgtgaaagagccccctgtgctcatcacgcgccccttggaggaccagctggtgatggtggggcagcgggtggagtttgagtgtgaagtatcggaggagggggcgcaagtcaaatggctgaaggacggggtggagctgacccgggaggagaccttcaaataccggttcaagaaggacgggcagagacaccacctgatcatcaacgaggccatgctggaggacgcggggcactatgcactgtgcactagcgggggccaggcgctggctgagctcattgtgcaggaaaagaagctggaggtgtaccagagcatcgcagacctgatggtgggcgcaaaggaccaggcggtgttcaaatgtgaggtctcagatgagaatgttcggggtgtgtggctgaagaatgggaaggagctggtgcccgacagccgcataaaggtgtcccacatcgggcgggtccacaaactgaccattgacgacgtcacacctgccgacgaggctgactacagctttgtgcccgagggcttcgcctgcaacctgtcagccaagctccacttcatggaggtcaagattgacttcgtacccaggcaggaacctcccaagatccacctggactgcccaggccgcataccagacaccattgtggttgtagctggaaataagctacgtctggacgtccctatctctggggaccctgctcccactgtgatctggcagaaggctatcacgcaggggaataaggccccagccaggccagccccagatgccccagaggacacaggtgacagcgatgagtgggtgtttgacaagaagctgctgtgtgagaccgagggccgggtccgcgtggagaccaccaaggaccgcagcatcttcacggtcgagggggcagagaaggaagatgagggcgtctacacggtcacagtgaagaaccctgtgggcgaggaccaggtcaacctcacagtcaaggtcatcgacgtgccagacgcacctgcggcccccaagatcagcaacgtgggagaggactcctgcacagtacagtgggagccgcctgcctacgatggcgggcagcccatcctgggctacatcctggagcgcaagaagaagaagagctaccggtggatgcggctgaacttcgacctgattcaggagctgagtcatgaagcgcggcgcatgatcgagggcgtggtgtacgagatgcgcgtctacgcggtcaacgccatcggcatgtccaggcccagccctgcctcccagcccttcatgcctatcggtccccccagcgaacccacccacctggcagtagaggacgtctctgacaccacggtctccctcaagtggcggcccccagagcgcgtgggagcaggaggcctggatggctacagcgtggagtactgcccagagggctgctcagagtgggtggctgccctgcaggggctgacagagcacacatcgatactggtgaaggacctgcccacgggggcccggctgcttttccgagtgcgggcacacaatatggcagggcctggagcccctgttaccaccacggagccggtgacagtgcaggagatcctgcaacggccacggcttcagctgcccaggcacctgcgccagaccattcagaagaaggtcggggagcctgtgaaccttctcatccctttccagggcaagccccggcctcaggtgacctggaccaaagaggggcagcccctggcaggcgaggaggtgagcatccgcaacagccccacagacaccatcctgttcatccgggccgctcgccgcgtgcattcaggcacttaccaggtgacggtgcgcattgagaacatggaggacaaggccacgctggtgctgcaggttgttgacaagccaagtcctccccaggatctccgggtgactgacgcctggggtcttaatgtggctctggagtggaagccaccccaggatgtcggcaacacggagctctgggggtacacagtgcagaaagccgacaagaagaccatggagtggttcaccgtcttggagcattaccgccgcacccactgcgtggtgccagagctcatcattggcaatggctactacttccgcgtcttcagccagaatatggttggctttagtgacagagcggccaccaccaaggagcccgtctttatccccagaccaggcatcacctatgagccacccaactataaggccctggacttctccgaggccccaagcttcacccagcccctggtgaaccgctcggtcatcgcgggctacactgctatgctctgctgtgctgtccggggtagccccaagcccaagatttcctggttcaagaatggcctggacctgggagaagacgcccgcttccgcatgttcagcaagcagggagtgttgactctggagattagaaagccctgcccctttgacgggggcatctatgtctgcagggccaccaacttacagggcgaggcacggtgtgagtgccgcctggaggtgcgagtgcctcagtgatctgttgtttgcccctcccccgtgccttccttgaccctggaaggtgccactcccactgtcctttcctaataaaatgaggaaattgcatcgcattgtctgagtaggtgtcattctattctggggggtggggtggggcaggacagcaagggggaggattgggaagacaatagcaggcatgctggggatgcggtgggctctatgggcggccgcaggaacccctagtgatggagttggccactccctctctgcgcgctcgctcgctcactgaggccgcccgggcaaagcccgggcgtcgggcgacctttggtcgcccggcctcagtgagcgagcgagcgcgcagagagggagtggccaa

SEQ ID NO: 144 - DNA, 4939 bp, synthetic construct
  source 1..4939: mol_type = other DNA
ctgcgcgctcgctcgctcactgaggccgggcgaccaaaggtcgcccgacgcccgggctttgcccgggcggcctcagtgagcgagcgagcgcgcagagagggagtggccaactccatcactaggggttcctgcggccgcagtggagcagcacataactcttgccctctgccttccaagattctggtgctgagacttatggagtgtcttggaggttgccttctgccccccaaccctgctcccagctggccctcccaggcctgggttgctggcctctgctttatcaggattctcaagagggacagctggtttatgttgcatgactgttccctgcatatctgctctggttttaaatagcttatctgagcagctggaggaccacatgggcttatatggcgtggggtacatgttcctgtagccttgtccctggcacctgccaaaatagcagccaacaccccccacccccaccgccatccccctgccccacccgtcccctgtcgcacattcctccctccgcagggctggctcaccaggccccagcccacatgcctgcttaaagccctctccatcctctgcctcacccagtccccgctgagactgagcagacgcctccaggatctgtcggcagctgctgttctgagccaccatgcctgagccggggaagaagccagtctcagcttttagcaagaagccacggtcagtggaagtggccgcaggcagccctgccgtgttcgaggccgagacagagcgggcaggagtgaaggtgcgctggcagcgcggaggcagtgacatcagcgccagcaacaagtacggcctggccacagagggcacacggcatacgctgacagtgcgggaagtgggccctgccgaccagggatcttacgcagtcattgctggctcctccaaggtcaagttcgacctcaaggtcatagaggcaggtaagtactagcagctacaatccagctaccattctgcttttattttatggttgggataaggctggattattctgagtccaagctaggcccttttgctaatcatgttcatacctcttatcttcctcccacagagaaggcagagcccatgctggcccctgcccctgcccctgctgaggccactggagcccctggagaagccccggccccagccgctgagctgggagaaagtgccccaagtcccaaagggtcaagctcagcagctctcaatggtcctacccctggagcccccgatgaccccattggcctcttcgtgatgcggccacaggatggcgaggtgaccgtgggtggcagcatcaccttctcagcccgcgtggccggcgccagcctcctgaagccgcctgtggtcaagtggttcaagggcaaatgggtggacctgagcagcaaggtgggccagcacctgcagctgcacgacagctacgaccgcgccagcaaggtctatctgttcgagctgcacatcaccgatgcccagcctgccttcactggcagctaccgctgtgaggtgtccaccaaggacaaatttgactgctccaacttcaatctcactgtccacgaggccatgggcaccggagacctggacctcctatcagccttccgccgcacgagcctggctggaggtggtcggcggatcagtgatagccatgaggacactgggattctggacttcagctcactgctgaaaaagagagacagtttccggaccccgagggactcgaagctggaggcaccagcagaggaggacgtgtgggagatcctacggcaggcacccccatctgagtacgagcgcatcgccttccagtacggcgtcactgacctgcgcggcatgctaaagaggctcaagggcatgaggcgcgatgagaagaagagcacagcctttcagaagaagctggagccggcctaccaggtgagcaaaggccacaagatccggctgaccgtggaactggctgaccatgacgctgaggtcaaatggctcaagaatggccaggagatccagatgagcggcagcaagtacatctttgagtccatcggtgccaagcgtaccctgaccatcagccagtgctcattggcggacgacgcagcctaccagtgcgtggtgggtggcgagaagtgtagcacggagctctttgtgaaagagccccctgtgctcatcacgcgccccttggaggaccagctggtgatggtggggcagcgggtggagtttgagtgtgaagtatcggaggagggggcgcaagtcaaatggctgaaggacggggtggagctgacccgggaggagaccttcaaataccggttcaagaaggacgggcagagacaccacctgatcatcaacgaggccatgctggaggacgcggggcactatgcactgtgcactagcgggggccaggcgctggctgagctcattgtgcaggaaaagaagctggaggtgtaccagagcatcgcagacctgatggtgggcgcaaaggaccaggcggtgttcaaatgtgaggtctcagatgagaatgttcggggtgtgtggctgaagaatgggaaggagctggtgcccgacagccgcataaaggtgtcccacatcgggcgggtccacaaactgaccattgacgacgtcacacctgccgacgaggctgactacagctttgtgcccgagggcttcgcctgcaacctgtcagccaagctccacttcatggaggtcaagattgacttcgtacccaggcaggaacctcccaagatccacctggactgcccaggccgcataccagacaccattgtggttgtagctggaaataagctacgtctggacgtccctatctctggggaccctgctcccactgtgatctggcagaaggctatcacgcaggggaataaggccccagccaggccagccccagatgccccagaggacacaggtgacagcgatgagtgggtgtttgacaagaagctgctgtgtgagaccgagggccgggtccgcgtggagaccaccaaggaccgcagcatcttcacggtcgagggggcagagaaggaagatgagggcgtctacacggtcacagtgaagaaccctgtgggcgaggaccaggtcaacctcacagtcaaggtcatcgacgtgccagacgcacctgcggcccccaagatcagcaacgtgggagaggactcctgcacagtacagtgggagccgcctgcctacgatggcgggcagcccatcctgggctacatcctggagcgcaagaagaagaagagctaccggtggatgcggctgaacttcgacctgattcaggagctgagtcatgaagcgcggcgcatgatcgagggcgtggtgtacgagatgcgcgtctacgcggtcaacgccatcggcatgtccaggcccagccctgcctcccagcccttcatgcctatcggtccccccagcgaacccacccacctggcagtagaggacgtctctgacaccacggtctccctcaagtggcggcccccagagcgcgtgggagcaggaggcctggatggctacagcgtggagtactgcccagagggctgctcagagtgggtggctgccctgcaggggctgacagagcacacatcgatactggtgaaggacctgcccacgggggcccggctgcttttccgagtgcgggcacacaatatggcagggcctggagcccctgttaccaccacggagccggtgacagtgcaggagatcctgcaacggccacggcttcagctgcccaggcacctgcgccagaccattcagaagaaggtcggggagcctgtgaaccttctcatccctttccagggcaagccccggcctcaggtgacctggaccaaagaggggcagcccctggcaggcgaggaggtgagcatccgcaacagccccacagacaccatcctgttcatccgggccgctcgccgcgtgcattcaggcacttaccaggtgacggtgcgcattgagaacatggaggacaaggccacgctggtgctgcaggttgttgacaagccaagtcctccccaggatctccgggtgactgacgcctggggtcttaatgtggctctggagtggaagccaccccaggatgtcggcaacacggagctctgggggtacacagtgcagaaagccgacaagaagaccatggagtggttcaccgtcttggagcattaccgccgcacccactgcgtggtgccagagctcatcattggcaatggctactacttccgcgtcttcagccagaatatggttggctttagtgacagagcggccaccaccaaggagcccgtctttatccccagaccaggcatcacctatgagccacccaactataaggccctggacttctccgaggccccaagcttcacccagcccctggtgaaccgctcggtcatcgcgggctacactgctatgctctgctgtgctgtccggggtagccccaagcccaagatttcctggttcaagaatggcctggacctgggagaagacgcccgcttccgcatgttcagcaagcagggagtgttgactctggagattagaaagccctgcccctttgacgggggcatctatgtctgcagggccaccaacttacagggcgaggcacggtgtgagtgccgcctggaggtgcgagtgcctcagtgatctgttgtttgcccctcccccgtgccttccttgaccctggaaggtgccactcccactgtcctttcctaataaaatgaggaaattgcatcgcattgtctgagtaggtgtcattctattctggggggtggggtggggcaggacagcaagggggaggattgggaagacaatagcaggcatgctggggatgcggtgggctctatgggcggccgcaggaacccctagtgatggagttggccactccctctctgcgcgctcgctcgctcactgaggccgggcgaccaaaggtcgcccgacgcccgggctttgcccgggcggcctcagtgagcgagcgagcgcgcag

SEQ ID NO: 145 - DNA, 4969 bp, synthetic construct
  source 1..4969: mol_type = other DNA
ttggccactccctctctgcgcgctcgctcgctcactgaggccgggcgaccaaaggtcgcccgacgcccgggctttgcccgggcggcctcagtgagcgagcgagcgcgcagagagggagtggccaactccatcactaggggttcctgcggccgcagtggagcagcacataactcttgccctctgccttccaagattctggtgctgagacttatggagtgtcttggaggttgccttctgccccccaaccctgctcccagctggccctcccaggcctgggttgctggcctctgctttatcaggattctcaagagggacagctggtttatgttgcatgactgttccctgcatatctgctctggttttaaatagcttatctgagcagctggaggaccacatgggcttatatggcgtggggtacatgttcctgtagccttgtccctggcacctgccaaaatagcagccaacaccccccacccccaccgccatccccctgccccacccgtcccctgtcgcacattcctccctccgcagggctggctcaccaggccccagcccacatgcctgcttaaagccctctccatcctctgcctcacccagtccccgctgagactgagcagacgcctccaggatctgtcggcagctgctgttctgagccaccatgcctgagccggggaagaagccagtctcagcttttagcaagaagccacggtcagtggaagtggccgcaggcagccctgccgtgttcgaggccgagacagagcgggcaggagtgaaggtgcgctggcagcgcggaggcagtgacatcagcgccagcaacaagtacggcctggccacagagggcacacggcatacgctgacagtgcgggaagtgggccctgccgaccagggatcttacgcagtcattgctggctcctccaaggtcaagttcgacctcaaggtcatagaggcaggtaagtactagcagctacaatccagctaccattctgcttttattttatggttgggataaggctggattattctgagtccaagctaggcccttttgctaatcatgttcatacctcttatcttcctcccacagagaaggcagagcccatgctggcccctgcccctgcccctgctgaggccactggagcccctggagaagccccggccccagccgctgagctgggagaaagtgccccaagtcccaaagggtcaagctcagcagctctcaatggtcctacccctggagcccccgatgaccccattggcctcttcgtgatgcggccacaggatggcgaggtgaccgtgggtggcagcatcaccttctcagcccgcgtggccggcgccagcctcctgaagccgcctgtggtcaagtggttcaagggcaaatgggtggacctgagcagcaaggtgggccagcacctgcagctgcacgacagctacgaccgcgccagcaaggtctatctgttcgagctgcacatcaccgatgcccagcctgccttcactggcagctaccgctgtgaggtgtccaccaaggacaaatttgactgctccaacttcaatctcactgtccacgaggccatgggcaccggagacctggacctcctatcagccttccgccgcacgagcctggctggaggtggtcggcggatcagtgatagccatgaggacactgggattctggacttcagctcactgctgaaaaagagagacagtttccggaccccgagggactcgaagctggaggcaccagcagaggaggacgtgtgggagatcctacggcaggcacccccatctgagtacgagcgcatcgccttccagtacggcgtcactgacctgcgcggcatgctaaagaggctcaagggcatgaggcgcgatgagaagaagagcacagcctttcagaagaagctggagccggcctaccaggtgagcaaaggccacaagatccggctgaccgtggaactggctgaccatgacgctgaggtcaaatggctcaagaatggccaggagatccagatgagcggcagcaagtacatctttgagtccatcggtgccaagcgtaccctgaccatcagccagtgctcattggcggacgacgcagcctaccagtgcgtggtgggtggcgagaagtgtagcacggagctctttgtgaaagagccccctgtgctcatcacgcgccccttggaggaccagctggtgatggtggggcagcgggtggagtttgagtgtgaagtatcggaggagggggcgcaagtcaaatggctgaaggacggggtggagctgacccgggaggagaccttcaaataccggttcaagaaggacgggcagagacaccacctgatcatcaacgaggccatgctggaggacgcggggcactatgcactgtgcactagcgggggccaggcgctggctgagctcattgtgcaggaaaagaagctggaggtgtaccagagcatcgcagacctgatggtgggcgcaaaggaccaggcggtgttcaaatgtgaggtctcagatgagaatgttcggggtgtgtggctgaagaatgggaaggagctggtgcccgacagccgcataaaggtgtcccacatcgggcgggtccacaaactgaccattgacgacgtcacacctgccgacgaggctgactacagctttgtgcccgagggcttcgcctgcaacctgtcagccaagctccacttcatggaggtcaagattgacttcgtacccaggcaggaacctcccaagatccacctggactgcccaggccgcataccagacaccattgtggttgtagctggaaataagctacgtctggacgtccctatctctggggaccctgctcccactgtgatctggcagaaggctatcacgcaggggaataaggccccagccaggccagccccagatgccccagaggacacaggtgacagcgatgagtgggtgtttgacaagaagctgctgtgtgagaccgagggccgggtccgcgtggagaccaccaaggaccgcagcatcttcacggtcgagggggcagagaaggaagatgagggcgtctacacggtcacagtgaagaaccctgtgggcgaggaccaggtcaacctcacagtcaaggtcatcgacgtgccagacgcacctgcggcccccaagatcagcaacgtgggagaggactcctgcacagtacagtgggagccgcctgcctacgatggcgggcagcccatcctgggctacatcctggagcgcaagaagaagaagagctaccggtggatgcggctgaacttcgacctgattcaggagctgagtcatgaagcgcggcgcatgatcgagggcgtggtgtacgagatgcgcgtctacgcggtcaacgccatcggcatgtccaggcccagccctgcctcccagcccttcatgcctatcggtccccccagcgaacccacccacctggcagtagaggacgtctctgacaccacggtctccctcaagtggcggcccccagagcgcgtgggagcaggaggcctggatggctacagcgtggagtactgcccagagggctgctcagagtgggtggctgccctgcaggggctgacagagcacacatcgatactggtgaaggacctgcccacgggggcccggctgcttttccgagtgcgggcacacaatatggcagggcctggagcccctgttaccaccacggagccggtgacagtgcaggagatcctgcaacggccacggcttcagctgcccaggcacctgcgccagaccattcagaagaaggtcggggagcctgtgaaccttctcatccctttccagggcaagccccggcctcaggtgacctggaccaaagaggggcagcccctggcaggcgaggaggtgagcatccgcaacagccccacagacaccatcctgttcatccgggccgctcgccgcgtgcattcaggcacttaccaggtgacggtgcgcattgagaacatggaggacaaggccacgctggtgctgcaggttgttgacaagccaagtcctccccaggatctccgggtgactgacgcctggggtcttaatgtggctctggagtggaagccaccccaggatgtcggcaacacggagctctgggggtacacagtgcagaaagccgacaagaagaccatggagtggttcaccgtcttggagcattaccgccgcacccactgcgtggtgccagagctcatcattggcaatggctactacttccgcgtcttcagccagaatatggttggctttagtgacagagcggccaccaccaaggagcccgtctttatccccagaccaggcatcacctatgagccacccaactataaggccctggacttctccgaggccccaagcttcacccagcccctggtgaaccgctcggtcatcgcgggctacactgctatgctctgctgtgctgtccggggtagccccaagcccaagatttcctggttcaagaatggcctggacctgggagaagacgcccgcttccgcatgttcagcaagcagggagtgttgactctggagattagaaagccctgcccctttgacgggggcatctatgtctgcagggccaccaacttacagggcgaggcacggtgtgagtgccgcctggaggtgcgagtgcctcagtgatctgttgtttgcccctcccccgtgccttccttgaccctggaaggtgccactcccactgtcctttcctaataaaatgaggaaattgcatcgcattgtctgagtaggtgtcattctattctggggggtggggtggggcaggacagcaagggggaggattgggaagacaatagcaggcatgctggggatgcggtgggctctatgggcggccgcaggaacccctagtgatggagttggccactccctctctgcgcgctcgctcgctcactgaggccgggcgaccaaaggtcgcccgacgcccgggctttgcccgggcggcctcagtgagcgagcgagcgcgcagagagggagtggccaa

SEQ ID NO: 146 - DNA, 4871 bp, synthetic construct
  source 1..4871: mol_type = other DNA
ctgcgcgctcgctcgctcactgaggccgggcgaccaaaggtcgcccgacgcccgggctttgcccgggcggcctcagtgagcgagcgagcgcgcagagagggagtggccaactccatcactaggggttcctgcggccgcctggaagatgtctttacccccagcatcagttcaagtggagcagcacataactcttgccctctgccttccaagattctggtgctgagacttatggagtgtcttggaggttgccttctgccccccaaccctgctcccagctggccctcccaggcctgggttgctggcctctgctttatcaggattctcaagagggacagctggtttatgttgcatgactgttccctgcatatctgctctggttttaaatagcttatctgagcagctggaggaccacatgggcttatatggcgtggggtacatgttcctgtagccttgtccctggcacctgccaaaatagcagccaacaccccccacccccaccgccatccccctgccccacccgtcccctgtcgcacattcctccctccgcagggctggctcaccaggccccagcccacatgcctgcttaaagccctctccatcctctgcctcacccagtccccgctgagactgagcagacgcctccaggatctgtcggcagctgctgttctgagccaccatgcctgagccggggaagaagccagtctcagcttttagcaagaagccacggtcagtggaagtggccgcaggcagccctgccgtgttcgaggccgagacagagcgggcaggagtgaaggtgcgctggcagcgcggaggcagtgacatcagcgccagcaacaagtacggcctggccacagagggcacacggcatacgctgacagtgcgggaagtgggccctgccgaccagggatcttacgcagtcattgctggctcctccaaggtcaagttcgacctcaaggtcatagaggcagagaaggcagagcccatgctggcccctgcccctgcccctgctgaggccactggagcccctggagaagccccggccccagccgctgagctgggagaaagtgccccaagtcccaaagggtcaagctcagcagctctcaatggtcctacccctggagcccccgatgaccccattggcctcttcgtgatgcggccacaggatggcgaggtgaccgtgggtggcagcatcaccttctcagcccgcgtggccggcgccagcctcctgaagccgcctgtggtcaagtggttcaagggcaaatgggtggacctgagcagcaaggtgggccagcacctgcagctgcacgacagctacgaccgcgccagcaaggtctatctgttcgagctgcacatcaccgatgcccagcctgccttcactggcagctaccgctgtgaggtgtccaccaaggacaaatttgactgctccaacttcaatctcactgtccacgaggccatgggcaccggagacctggacctcctatcagccttccgccgcacgagcctggctggaggtggtcggcggatcagtgatagccatgaggacactgggattctggacttcagctcactgctgaaaaagagagacagtttccggaccccgagggactcgaagctggaggcaccagcagaggaggacgtgtgggagatcctacggcaggcacccccatctgagtacgagcgcatcgccttccagtacggcgtcactgacctgcgcggcatgctaaagaggctcaagggcatgaggcgcgatgagaagaagagcacagcctttcagaagaagctggagccggcctaccaggtgagcaaaggccacaagatccggctgaccgtggaactggctgaccatgacgctgaggtcaaatggctcaagaatggccaggagatccagatgagcggcagcaagtacatctttgagtccatcggtgccaagcgtaccctgaccatcagccagtgctcattggcggacgacgcagcctaccagtgcgtggtgggtggcgagaagtgtagcacggagctctttgtgaaagagccccctgtgctcatcacgcgccccttggaggaccagctggtgatggtggggcagcgggtggagtttgagtgtgaagtatcggaggagggggcgcaagtcaaatggctgaaggacggggtggagctgacccgggaggagaccttcaaataccggttcaagaaggacgggcagagacaccacctgatcatcaacgaggccatgctggaggacgcggggcactatgcactgtgcactagcgggggccaggcgctggctgagctcattgtgcaggaaaagaagctggaggtgtaccagagcatcgcagacctgatggtgggcgcaaaggaccaggcggtgttcaaatgtgaggtctcagatgagaatgttcggggtgtgtggctgaagaatgggaaggagctggtgcccgacagccgcataaaggtgtcccacatcgggcgggtccacaaactgaccattgacgacgtcacacctgccgacgaggctgactacagctttgtgcccgagggcttcgcctgcaacctgtcagccaagctccacttcatggaggtcaagattgacttcgtacccaggcaggaacctcccaagatccacctggactgcccaggccgcataccagacaccattgtggttgtagctggaaataagctacgtctggacgtccctatctctggggaccctgctcccactgtgatctggcagaaggctatcacgcaggggaataaggccccagccaggccagccccagatgccccagaggacacaggtgacagcgatgagtgggtgtttgacaagaagctgctgtgtgagaccgagggccgggtccgcgtggagaccaccaaggaccgcagcatcttcacggtcgagggggcagagaaggaagatgagggcgtctacacggtcacagtgaagaaccctgtgggcgaggaccaggtcaacctcacagtcaaggtcatcgacgtgccagacgcacctgcggcccccaagatcagcaacgtgggagaggactcctgcacagtacagtgggagccgcctgcctacgatggcgggcagcccatcctgggctacatcctggagcgcaagaagaagaagagctaccggtggatgcggctgaacttcgacctgattcaggagctgagtcatgaagcgcggcgcatgatcgagggcgtggtgtacgagatgcgcgtctacgcggtcaacgccatcggcatgtccaggcccagccctgcctcccagcccttcatgcctatcggtccccccagcgaacccacccacctggcagtagaggacgtctctgacaccacggtctccctcaagtggcggcccccagagcgcgtgggagcaggaggcctggatggctacagcgtggagtactgcccagagggctgctcagagtgggtggctgccctgcaggggctgacagagcacacatcgatactggtgaaggacctgcccacgggggcccggctgcttttccgagtgcgggcacacaatatggcagggcctggagcccctgttaccaccacggagccggtgacagtgcaggagatcctgcaacggccacggcttcagctgcccaggcacctgcgccagaccattcagaagaaggtcggggagcctgtgaaccttctcatccctttccagggcaagccccggcctcaggtgacctggaccaaagaggggcagcccctggcaggcgaggaggtgagcatccgcaacagccccacagacaccatcctgttcatccgggccgctcgccgcgtgcattcaggcacttaccaggtgacggtgcgcattgagaacatggaggacaaggccacgctggtgctgcaggttgttgacaagccaagtcctccccaggatctccgggtgactgacgcctggggtcttaatgtggctctggagtggaagccaccccaggatgtcggcaacacggagctctgggggtacacagtgcagaaagccgacaagaagaccatggagtggttcaccgtcttggagcattaccgccgcacccactgcgtggtgccagagctcatcattggcaatggctactacttccgcgtcttcagccagaatatggttggctttagtgacagagcggccaccaccaaggagcccgtctttatccccagaccaggcatcacctatgagccacccaactataaggccctggacttctccgaggccccaagcttcacccagcccctggtgaaccgctcggtcatcgcgggctacactgctatgctctgctgtgctgtccggggtagccccaagcccaagatttcctggttcaagaatggcctggacctgggagaagacgcccgcttccgcatgttcagcaagcagggagtgttgactctggagattagaaagccctgcccctttgacgggggcatctatgtctgcagggccaccaacttacagggcgaggcacggtgtgagtgccgcctggaggtgcgagtgcctcagtgacctcgagctgtgccttctagttgccagccatctgttgtttgcccctcccccgtgccttccttgaccctggaaggtgccactcccactgtcctttcctaataaaatgaggaaattgcatcgcattgtctgagtaggtgtcattctattctggggggtggggtggggcaggacagcaagggggaggattgggaagacaatagcaggcatgctggggatgcggtgggctctatgggcggccgcaggaacccctagtgatggagttggccactccctctctgcgcgctcgctcgctcactgaggccgcccgggcaaagcccgggcgtcgggcgacctttggtcgcccggcctcagtgagcgagcgagcgcgcag

SEQ ID NO: 147 - DNA, 4901 bp, synthetic construct
  source 1..4901: mol_type = other DNA
ttggccactccctctctgcgcgctcgctcgctcactgaggccgggcgaccaaaggtcgcccgacgcccgggctttgcccgggcggcctcagtgagcgagcgagcgcgcagagagggagtggccaactccatcactaggggttcctgcggccgcctggaagatgtctttacccccagcatcagttcaagtggagcagcacataactcttgccctctgccttccaagattctggtgctgagacttatggagtgtcttggaggttgccttctgccccccaaccctgctcccagctggccctcccaggcctgggttgctggcctctgctttatcaggattctcaagagggacagctggtttatgttgcatgactgttccctgcatatctgctctggttttaaatagcttatctgagcagctggaggaccacatgggcttatatggcgtggggtacatgttcctgtagccttgtccctggcacctgccaaaatagcagccaacaccccccacccccaccgccatccccctgccccacccgtcccctgtcgcacattcctccctccgcagggctggctcaccaggccccagcccacatgcctgcttaaagccctctccatcctctgcctcacccagtccccgctgagactgagcagacgcctccaggatctgtcggcagctgctgttctgagccaccatgcctgagccggggaagaagccagtctcagcttttagcaagaagccacggtcagtggaagtggccgcaggcagccctgccgtgttcgaggccgagacagagcgggcaggagtgaaggtgcgctggcagcgcggaggcagtgacatcagcgccagcaacaagtacggcctggccacagagggcacacggcatacgctgacagtgcgggaagtgggccctgccgaccagggatcttacgcagtcattgctggctcctccaaggtcaagttcgacctcaaggtcatagaggcagagaaggcagagcccatgctggcccctgcccctgcccctgctgaggccactggagcccctggagaagccccggccccagccgctgagctgggagaaagtgccccaagtcccaaagggtcaagctcagcagctctcaatggtcctacccctggagcccccgatgaccccattggcctcttcgtgatgcggccacaggatggcgaggtgaccgtgggtggcagcatcaccttctcagcccgcgtggccggcgccagcctcctgaagccgcctgtggtcaagtggttcaagggcaaatgggtggacctgagcagcaaggtgggccagcacctgcagctgcacgacagctacgaccgcgccagcaaggtctatctgttcgagctgcacatcaccgatgcccagcctgccttcactggcagctaccgctgtgaggtgtccaccaaggacaaatttgactgctccaacttcaatctcactgtccacgaggccatgggcaccggagacctggacctcctatcagccttccgccgcacgagcctggctggaggtggtcggcggatcagtgatagccatgaggacactgggattctggacttcagctcactgctgaaaaagagagacagtttccggaccccgagggactcgaagctggaggcaccagcagaggaggacgtgtgggagatcctacggcaggcacccccatctgagtacgagcgcatcgccttccagtacggcgtcactgacctgcgcggcatgctaaagaggctcaagggcatgaggcgcgatgagaagaagagcacagcctttcagaagaagctggagccggcctaccaggtgagcaaaggccacaagatccggctgaccgtggaactggctgaccatgacgctgaggtcaaatggctcaagaatggccaggagatccagatgagcggcagcaagtacatctttgagtccatcggtgccaagcgtaccctgaccatcagccagtgctcattggcggacgacgcagcctaccagtgcgtggtgggtggcgagaagtgtagcacggagctctttgtgaaagagccccctgtgctcatcacgcgccccttggaggaccagctggtgatggtggggcagcgggtggagtttgagtgtgaagtatcggaggagggggcgcaagtcaaatggctgaaggacggggtggagctgacccgggaggagaccttcaaataccggttcaagaaggacgggcagagacaccacctgatcatcaacgaggccatgctggaggacgcggggcactatgcactgtgcactagcgggggccaggcgctggctgagctcattgtgcaggaaaagaagctggaggtgtaccagagcatcgcagacctgatggtgggcgcaaaggaccaggcggtgttcaaatgtgaggtctcagatgagaatgttcggggtgtgtggctgaagaatgggaaggagctggtgcccgacagccgcataaaggtgtcccacatcgggcgggtccacaaactgaccattgacgacgtcacacctgccgacgaggctgactacagctttgtgcccgagggcttcgcctgcaacctgtcagccaagctccacttcatggaggtcaagattgacttcgtacccaggcaggaacctcccaagatccacctggactgcccaggccgcataccagacaccattgtggttgtagctggaaataagctacgtctggacgtccctatctctggggaccctgctcccactgtgatctggcagaaggctatcacgcaggggaataaggccccagccaggccagccccagatgccccagaggacacaggtgacagcgatgagtgggtgtttgacaagaagctgctgtgtgagaccgagggccgggtccgcgtggagaccaccaaggaccgcagcatcttcacggtcgagggggcagagaaggaagatgagggcgtctacacggtcacagtgaagaaccctgtgggcgaggaccaggtcaacctcacagtcaaggtcatcgacgtgccagacgcacctgcggcccccaagatcagcaacgtgggagaggactcctgcacagtacagtgggagccgcctgcctacgatggcgggcagcccatcctgggctacatcctggagcgcaagaagaagaagagctaccggtggatgcggctgaacttcgacctgattcaggagctgagtcatgaagcgcggcgcatgatcgagggcgtggtgtacgagatgcgcgtctacgcggtcaacgccatcggcatgtccaggcccagccctgcctcccagcccttcatgcctatcggtccccccagcgaacccacccacctggcagtagaggacgtctctgacaccacggtctccctcaagtggcggcccccagagcgcgtgggagcaggaggcctggatggctacagcgtggagtactgcccagagggctgctcagagtgggtggctgccctgcaggggctgacagagcacacatcgatactggtgaaggacctgcccacgggggcccggctgcttttccgagtgcgggcacacaatatggcagggcctggagcccctgttaccaccacggagccggtgacagtgcaggagatcctgcaacggccacggcttcagctgcccaggcacctgcgccagaccattcagaagaaggtcggggagcctgtgaaccttctcatccctttccagggcaagccccggcctcaggtgacctggaccaaagaggggcagcccctggcaggcgaggaggtgagcatccgcaacagccccacagacaccatcctgttcatccgggccgctcgccgcgtgcattcaggcacttaccaggtgacggtgcgcattgagaacatggaggacaaggccacgctggtgctgcaggttgttgacaagccaagtcctccccaggatctccgggtgactgacgcctggggtcttaatgtggctctggagtggaagccaccccaggatgtcggcaacacggagctctgggggtacacagtgcagaaagccgacaagaagaccatggagtggttcaccgtcttggagcattaccgccgcacccactgcgtggtgccagagctcatcattggcaatggctactacttccgcgtcttcagccagaatatggttggctttagtgacagagcggccaccaccaaggagcccgtctttatccccagaccaggcatcacctatgagccacccaactataaggccctggacttctccgaggccccaagcttcacccagcccctggtgaaccgctcggtcatcgcgggctacactgctatgctctgctgtgctgtccggggtagccccaagcccaagatttcctggttcaagaatggcctggacctgggagaagacgcccgcttccgcatgttcagcaagcagggagtgttgactctggagattagaaagccctgcccctttgacgggggcatctatgtctgcagggccaccaacttacagggcgaggcacggtgtgagtgccgcctggaggtgcgagtgcctcagtgacctcgagctgtgccttctagttgccagccatctgttgtttgcccctcccccgtgccttccttgaccctggaaggtgccactcccactgtcctttcctaataaaatgaggaaattgcatcgcattgtctgagtaggtgtcattctattctggggggtggggtggggcaggacagcaagggggaggattgggaagacaatagcaggcatgctggggatgcggtgggctctatgggcggccgcaggaacccctagtgatggagttggccactccctctctgcgcgctcgctcgctcactgaggccgcccgggcaaagcccgggcgtcgggcgacctttggtcgcccggcctcagtgagcgagcgagcgcgcagagagggagtggccaa

SEQ ID NO: 148 - DNA, 4871 bp, synthetic construct
  source 1..4871: mol_type = other DNA
ctgcgcgctcgctcgctcactgaggccgcccgggcaaagcccgggcgtcgggcgacctttggtcgcccggcctcagtgagcgagcgagcgcgcagagagggagtggccaactccatcactaggggttcctgcggccgcctggaagatgtctttacccccagcatcagttcaagtggagcagcacataactcttgccctctgccttccaagattctggtgctgagacttatggagtgtcttggaggttgccttctgccccccaaccctgctcccagctggccctcccaggcctgggttgctggcctctgctttatcaggattctcaagagggacagctggtttatgttgcatgactgttccctgcatatctgctctggttttaaatagcttatctgagcagctggaggaccacatgggcttatatggcgtggggtacatgttcctgtagccttgtccctggcacctgccaaaatagcagccaacaccccccacccccaccgccatccccctgccccacccgtcccctgtcgcacattcctccctccgcagggctggctcaccaggccccagcccacatgcctgcttaaagccctctccatcctctgcctcacccagtccccgctgagactgagcagacgcctccaggatctgtcggcagctgctgttctgagccaccatgcctgagccggggaagaagccagtctcagcttttagcaagaagccacggtcagtggaagtggccgcaggcagccctgccgtgttcgaggccgagacagagcgggcaggagtgaaggtgcgctggcagcgcggaggcagtgacatcagcgccagcaacaagtacggcctggccacagagggcacacggcatacgctgacagtgcgggaagtgggccctgccgaccagggatcttacgcagtcattgctggctcctccaaggtcaagttcgacctcaaggtcatagaggcagagaaggcagagcccatgctggcccctgcccctgcccctgctgaggccactggagcccctggagaagccccggccccagccgctgagctgggagaaagtgccccaagtcccaaagggtcaagctcagcagctctcaatggtcctacccctggagcccccgatgaccccattggcctcttcgtgatgcggccacaggatggcgaggtgaccgtgggtggcagcatcaccttctcagcccgcgtggccggcgccagcctcctgaagccgcctgtggtcaagtggttcaagggcaaatgggtggacctgagcagcaaggtgggccagcacctgcagctgcacgacagctacgaccgcgccagcaaggtctatctgttcgagctgcacatcaccgatgcccagcctgccttcactggcagctaccgctgtgaggtgtccaccaaggacaaatttgactgctccaacttcaatctcactgtccacgaggccatgggcaccggagacctggacctcctatcagccttccgccgcacgagcctggctggaggtggtcggcggatcagtgatagccatgaggacactgggattctggacttcagctcactgctgaaaaagagagacagtttccggaccccgagggactcgaagctggaggcaccagcagaggaggacgtgtgggagatcctacggcaggcacccccatctgagtacgagcgcatcgccttccagtacggcgtcactgacctgcgcggcatgctaaagaggctcaagggcatgaggcgcgatgagaagaagagcacagcctttcagaagaagctggagccggcctaccaggtgagcaaaggccacaagatccggctgaccgtggaactggctgaccatgacgctgaggtcaaatggctcaagaatggccaggagatccagatgagcggcagcaagtacatctttgagtccatcggtgccaagcgtaccctgaccatcagccagtgctcattggcggacgacgcagcctaccagtgcgtggtgggtggcgagaagtgtagcacggagctctttgtgaaagagccccctgtgctcatcacgcgccccttggaggaccagctggtgatggtggggcagcgggtggagtttgagtgtgaagtatcggaggagggggcgcaagtcaaatggctgaaggacggggtggagctgacccgggaggagaccttcaaataccggttcaagaaggacgggcagagacaccacctgatcatcaacgaggccatgctggaggacgcggggcactatgcactgtgcactagcgggggccaggcgctggctgagctcattgtgcaggaaaagaagctggaggtgtaccagagcatcgcagacctgatggtgggcgcaaaggaccaggcggtgttcaaatgtgaggtctcagatgagaatgttcggggtgtgtggctgaagaatgggaaggagctggtgcccgacagccgcataaaggtgtcccacatcgggcgggtccacaaactgaccattgacgacgtcacacctgccgacgaggctgactacagctttgtgcccgagggcttcgcctgcaacctgtcagccaagctccacttcatggaggtcaagattgacttcgtacccaggcaggaacctcccaagatccacctggactgcccaggccgcataccagacaccattgtggttgtagctggaaataagctacgtctggacgtccctatctctggggaccctgctcccactgtgatctggcagaaggctatcacgcaggggaataaggccccagccaggccagccccagatgccccagaggacacaggtgacagcgatgagtgggtgtttgacaagaagctgctgtgtgagaccgagggccgggtccgcgtggagaccaccaaggaccgcagcatcttcacggtcgagggggcagagaaggaagatgagggcgtctacacggtcacagtgaagaaccctgtgggcgaggaccaggtcaacctcacagtcaaggtcatcgacgtgccagacgcacctgcggcccccaagatcagcaacgtgggagaggactcctgcacagtacagtgggagccgcctgcctacgatggcgggcagcccatcctgggctacatcctggagcgcaagaagaagaagagctaccggtggatgcggctgaacttcgacctgattcaggagctgagtcatgaagcgcggcgcatgatcgagggcgtggtgtacgagatgcgcgtctacgcggtcaacgccatcggcatgtccaggcccagccctgcctcccagcccttcatgcctatcggtccccccagcgaacccacccacctggcagtagaggacgtctctgacaccacggtctccctcaagtggcggcccccagagcgcgtgggagcaggaggcctggatggctacagcgtggagtactgcccagagggctgctcagagtgggtggctgccctgcaggggctgacagagcacacatcgatactggtgaaggacctgcccacgggggcccggctgcttttccgagtgcgggcacacaatatggcagggcctggagcccctgttaccaccacggagccggtgacagtgcaggagatcctgcaacggccacggcttcagctgcccaggcacctgcgccagaccattcagaagaaggtcggggagcctgtgaaccttctcatccctttccagggcaagccccggcctcaggtgacctggaccaaagaggggcagcccctggcaggcgaggaggtgagcatccgcaacagccccacagacaccatcctgttcatccgggccgctcgccgcgtgcattcaggcacttaccaggtgacggtgcgcattgagaacatggaggacaaggccacgctggtgctgcaggttgttgacaagccaagtcctccccaggatctccgggtgactgacgcctggggtcttaatgtggctctggagtggaagccaccccaggatgtcggcaacacggagctctgggggtacacagtgcagaaagccgacaagaagaccatggagtggttcaccgtcttggagcattaccgccgcacccactgcgtggtgccagagctcatcattggcaatggctactacttccgcgtcttcagccagaatatggttggctttagtgacagagcggccaccaccaaggagcccgtctttatccccagaccaggcatcacctatgagccacccaactataaggccctggacttctccgaggccccaagcttcacccagcccctggtgaaccgctcggtcatcgcgggctacactgctatgctctgctgtgctgtccggggtagccccaagcccaagatttcctggttcaagaatggcctggacctgggagaagacgcccgcttccgcatgttcagcaagcagggagtgttgactctggagattagaaagccctgcccctttgacgggggcatctatgtctgcagggccaccaacttacagggcgaggcacggtgtgagtgccgcctggaggtgcgagtgcctcagtgacctcgagctgtgccttctagttgccagccatctgttgtttgcccctcccccgtgccttccttgaccctggaaggtgccactcccactgtcctttcctaataaaatgaggaaattgcatcgcattgtctgagtaggtgtcattctattctggggggtggggtggggcaggacagcaagggggaggattgggaagacaatagcaggcatgctggggatgcggtgggctctatgggcggccgcaggaacccctagtgatggagttggccactccctctctgcgcgctcgctcgctcactgaggccgcccgggcaaagcccgggcgtcgggcgacctttggtcgcccggcctcagtgagcgagcgagcgcgcag

SEQ ID NO: 149 - DNA, 4901 bp, synthetic construct
  source 1..4901: mol_type = other DNA
ttggccactccctctctgcgcgctcgctcgctcactgaggccgcccgggcaaagcccgggcgtcgggcgacctttggtcgcccggcctcagtgagcgagcgagcgcgcagagagggagtggccaactccatcactaggggttcctgcggccgcctggaagatgtctttacccccagcatcagttcaagtggagcagcacataactcttgccctctgccttccaagattctggtgctgagacttatggagtgtcttggaggttgccttctgccccccaaccctgctcccagctggccctcccaggcctgggttgctggcctctgctttatcaggattctcaagagggacagctggtttatgttgcatgactgttccctgcatatctgctctggttttaaatagcttatctgagcagctggaggaccacatgggcttatatggcgtggggtacatgttcctgtagccttgtccctggcacctgccaaaatagcagccaacaccccccacccccaccgccatccccctgccccacccgtcccctgtcgcacattcctccctccgcagggctggctcaccaggccccagcccacatgcctgcttaaagccctctccatcctctgcctcacccagtccccgctgagactgagcagacgcctccaggatctgtcggcagctgctgttctgagccaccatgcctgagccggggaagaagccagtctcagcttttagcaagaagccacggtcagtggaagtggccgcaggcagccctgccgtgttcgaggccgagacagagcgggcaggagtgaaggtgcgctggcagcgcggaggcagtgacatcagcgccagcaacaagtacggcctggccacagagggcacacggcatacgctgacagtgcgggaagtgggccctgccgaccagggatcttacgcagtcattgctggctcctccaaggtcaagttcgacctcaaggtcatagaggcagagaaggcagagcccatgctggcccctgcccctgcccctgctgaggccactggagcccctggagaagccccggccccagccgctgagctgggagaaagtgccccaagtcccaaagggtcaagctcagcagctctcaatggtcctacccctggagcccccgatgaccccattggcctcttcgtgatgcggccacaggatggcgaggtgaccgtgggtggcagcatcaccttctcagcccgcgtggccggcgccagcctcctgaagccgcctgtggtcaagtggttcaagggcaaatgggtggacctgagcagcaaggtgggccagcacctgcagctgcacgacagctacgaccgcgccagcaaggtctatctgttcgagctgcacatcaccgatgcccagcctgccttcactggcagctaccgctgtgaggtgtccaccaaggacaaatttgactgctccaacttcaatctcactgtccacgaggccatgggcaccggagacctggacctcctatcagccttccgccgcacgagcctggctggaggtggtcggcggatcagtgatagccatgaggacactgggattctggacttcagctcactgctgaaaaagagagacagtttccggaccccgagggactcgaagctggaggcaccagcagaggaggacgtgtgggagatcctacggcaggcacccccatctgagtacgagcgcatcgccttccagtacggcgtcactgacctgcgcggcatgctaaagaggctcaagggcatgaggcgcgatgagaagaagagcacagcctttcagaagaagctggagccggcctaccaggtgagcaaaggccacaagatccggctgaccgtggaactggctgaccatgacgctgaggtcaaatggctcaagaatggccaggagatccagatgagcggcagcaagtacatctttgagtccatcggtgccaagcgtaccctgaccatcagccagtgctcattggcggacgacgcagcctaccagtgcgtggtgggtggcgagaagtgtagcacggagctctttgtgaaagagccccctgtgctcatcacgcgccccttggaggaccagctggtgatggtggggcagcgggtggagtttgagtgtgaagtatcggaggagggggcgcaagtcaaatggctgaaggacggggtggagctgacccgggaggagaccttcaaataccggttcaagaaggacgggcagagacaccacctgatcatcaacgaggccatgctggaggacgcggggcactatgcactgtgcactagcgggggccaggcgctggctgagctcattgtgcaggaaaagaagctggaggtgtaccagagcatcgcagacctgatggtgggcgcaaaggaccaggcggtgttcaaatgtgaggtctcagatgagaatgttcggggtgtgtggctgaagaatgggaaggagctggtgcccgacagccgcataaaggtgtcccacatcgggcgggtccacaaactgaccattgacgacgtcacacctgccgacgaggctgactacagctttgtgcccgagggcttcgcctgcaacctgtcagccaagctccacttcatggaggtcaagattgacttcgtacccaggcaggaacctcccaagatccacctggactgcccaggccgcataccagacaccattgtggttgtagctggaaataagctacgtctggacgtccctatctctggggaccctgctcccactgtgatctggcagaaggctatcacgcaggggaataaggccccagccaggccagccccagatgccccagaggacacaggtgacagcgatgagtgggtgtttgacaagaagctgctgtgtgagaccgagggccgggtccgcgtggagaccaccaaggaccgcagcatcttcacggtcgagggggcagagaaggaagatgagggcgtctacacggtcacagtgaagaaccctgtgggcgaggaccaggtcaacctcacagtcaaggtcatcgacgtgccagacgcacctgcggcccccaagatcagcaacgtgggagaggactcctgcacagtacagtgggagccgcctgcctacgatggcgggcagcccatcctgggctacatcctggagcgcaagaagaagaagagctaccggtggatgcggctgaacttcgacctgattcaggagctgagtcatgaagcgcggcgcatgatcgagggcgtggtgtacgagatgcgcgtctacgcggtcaacgccatcggcatgtccaggcccagccctgcctcccagcccttcatgcctatcggtccccccagcgaacccacccacctggcagtagaggacgtctctgacaccacggtctccctcaagtggcggcccccagagcgcgtgggagcaggaggcctggatggctacagcgtggagtactgcccagagggctgctcagagtgggtggctgccctgcaggggctgacagagcacacatcgatactggtgaaggacctgcccacgggggcccggctgcttttccgagtgcgggcacacaatatggcagggcctggagcccctgttaccaccacggagccggtgacagtgcaggagatcctgcaacggccacggcttcagctgcccaggcacctgcgccagaccattcagaagaaggtcggggagcctgtgaaccttctcatccctttccagggcaagccccggcctcaggtgacctggaccaaagaggggcagcccctggcaggcgaggaggtgagcatccgcaacagccccacagacaccatcctgttcatccgggccgctcgccgcgtgcattcaggcacttaccaggtgacggtgcgcattgagaacatggaggacaaggccacgctggtgctgcaggttgttgacaagccaagtcctccccaggatctccgggtgactgacgcctggggtcttaatgtggctctggagtggaagccaccccaggatgtcggcaacacggagctctgggggtacacagtgcagaaagccgacaagaagaccatggagtggttcaccgtcttggagcattaccgccgcacccactgcgtggtgccagagctcatcattggcaatggctactacttccgcgtcttcagccagaatatggttggctttagtgacagagcggccaccaccaaggagcccgtctttatccccagaccaggcatcacctatgagccacccaactataaggccctggacttctccgaggccccaagcttcacccagcccctggtgaaccgctcggtcatcgcgggctacactgctatgctctgctgtgctgtccggggtagccccaagcccaagatttcctggttcaagaatggcctggacctgggagaagacgcccgcttccgcatgttcagcaagcagggagtgttgactctggagattagaaagccctgcccctttgacgggggcatctatgtctgcagggccaccaacttacagggcgaggcacggtgtgagtgccgcctggaggtgcgagtgcctcagtgacctcgagctgtgccttctagttgccagccatctgttgtttgcccctcccccgtgccttccttgaccctggaaggtgccactcccactgtcctttcctaataaaatgaggaaattgcatcgcattgtctgagtaggtgtcattctattctggggggtggggtggggcaggacagcaagggggaggattgggaagacaatagcaggcatgctggggatgcggtgggctctatgggcggccgcaggaacccctagtgatggagttggccactccctctctgcgcgctcgctcgctcactgaggccgcccgggcaaagcccgggcgtcgggcgacctttggtcgcccggcctcagtgagcgagcgagcgcgcagagagggagtggccaa

SEQ ID NO: 150 - DNA, 4871 bp, synthetic construct
  source 1..4871: mol_type = other DNA
ctgcgcgctcgctcgctcactgaggccgggcgaccaaaggtcgcccgacgcccgggctttgcccgggcggcctcagtgagcgagcgagcgcgcagagagggagtggccaactccatcactaggggttcctgcggccgcctggaagatgtctttacccccagcatcagttcaagtggagcagcacataactcttgccctctgccttccaagattctggtgctgagacttatggagtgtcttggaggttgccttctgccccccaaccctgctcccagctggccctcccaggcctgggttgctggcctctgctttatcaggattctcaagagggacagctggtttatgttgcatgactgttccctgcatatctgctctggttttaaatagcttatctgagcagctggaggaccacatgggcttatatggcgtggggtacatgttcctgtagccttgtccctggcacctgccaaaatagcagccaacaccccccacccccaccgccatccccctgccccacccgtcccctgtcgcacattcctccctccgcagggctggctcaccaggccccagcccacatgcctgcttaaagccctctccatcctctgcctcacccagtccccgctgagactgagcagacgcctccaggatctgtcggcagctgctgttctgagccaccatgcctgagccggggaagaagccagtctcagcttttagcaagaagccacggtcagtggaagtggccgcaggcagccctgccgtgttcgaggccgagacagagcgggcaggagtgaaggtgcgctggcagcgcggaggcagtgacatcagcgccagcaacaagtacggcctggccacagagggcacacggcatacgctgacagtgcgggaagtgggccctgccgaccagggatcttacgcagtcattgctggctcctccaaggtcaagttcgacctcaaggtcatagaggcagagaaggcagagcccatgctggcccctgcccctgcccctgctgaggccactggagcccctggagaagccccggccccagccgctgagctgggagaaagtgccccaagtcccaaagggtcaagctcagcagctctcaatggtcctacccctggagcccccgatgaccccattggcctcttcgtgatgcggccacaggatggcgaggtgaccgtgggtggcagcatcaccttctcagcccgcgtggccggcgccagcctcctgaagccgcctgtggtcaagtggttcaagggcaaatgggtggacctgagcagcaaggtgggccagcacctgcagctgcacgacagctacgaccgcgccagcaaggtctatctgttcgagctgcacatcaccgatgcccagcctgccttcactggcagctaccgctgtgaggtgtccaccaaggacaaatttgactgctccaacttcaatctcactgtccacgaggccatgggcaccggagacctggacctcctatcagccttccgccgcacgagcctggctggaggtggtcggcggatcagtgatagccatgaggacactgggattctggacttcagctcactgctgaaaaagagagacagtttccggaccccgagggactcgaagctggaggcaccagcagaggaggacgtgtgggagatcctacggcaggcacccccatctgagtacgagcgcatcgccttccagtacggcgtcactgacctgcgcggcatgctaaagaggctcaagggcatgaggcgcgatgagaagaagagcacagcctttcagaagaagctggagccggcctaccaggtgagcaaaggccacaagatccggctgaccgtggaactggctgaccatgacgctgaggtcaaatggctcaagaatggccaggagatccagatgagcggcagcaagtacatctttgagtccatcggtgccaagcgtaccctgaccatcagccagtgctcattggcggacgacgcagcctaccagtgcgtggtgggtggcgagaagtgtagcacggagctctttgtgaaagagccccctgtgctcatcacgcgccccttggaggaccagctggtgatggtggggcagcgggtggagtttgagtgtgaagtatcggaggagggggcgcaagtcaaatggctgaaggacggggtggagctgacccgggaggagaccttcaaataccggttcaagaaggacgggcagagacaccacctgatcatcaacgaggccatgctggaggacgcggggcactatgcactgtgcactagcgggggccaggcgctggctgagctcattgtgcaggaaaagaagctggaggtgtaccagagcatcgcagacctgatggtgggcgcaaaggaccaggcggtgttcaaatgtgaggtctcagatgagaatgttcggggtgtgtggctgaagaatgggaaggagctggtgcccgacagccgcataaaggtgtcccacatcgggcgggtccacaaactgaccattgacgacgtcacacctgccgacgaggctgactacagctttgtgcccgagggcttcgcctgcaacctgtcagccaagctccacttcatggaggtcaagattgacttcgtacccaggcaggaacctcccaagatccacctggactgcccaggccgcataccagacaccattgtggttgtagctggaaataagctacgtctggacgtccctatctctggggaccctgctcccactgtgatctggcagaaggctatcacgcaggggaataaggccccagccaggccagccccagatgccccagaggacacaggtgacagcgatgagtgggtgtttgacaagaagctgctgtgtgagaccgagggccgggtccgcgtggagaccaccaaggaccgcagcatcttcacggtcgagggggcagagaaggaagatgagggcgtctacacggtcacagtgaagaaccctgtgggcgaggaccaggtcaacctcacagtcaaggtcatcgacgtgccagacgcacctgcggcccccaagatcagcaacgtgggagaggactcctgcacagtacagtgggagccgcctgcctacgatggcgggcagcccatcctgggctacatcctggagcgcaagaagaagaagagctaccggtggatgcggctgaacttcgacctgattcaggagctgagtcatgaagcgcggcgcatgatcgagggcgtggtgtacgagatgcgcgtctacgcggtcaacgccatcggcatgtccaggcccagccctgcctcccagcccttcatgcctatcggtccccccagcgaacccacccacctggcagtagaggacgtctctgacaccacggtctccctcaagtggcggcccccagagcgcgtgggagcaggaggcctggatggctacagcgtggagtactgcccagagggctgctcagagtgggtggctgccctgcaggggctgacagagcacacatcgatactggtgaaggacctgcccacgggggcccggctgcttttccgagtgcgggcacacaatatggcagggcctggagcccctgttaccaccacggagccggtgacagtgcaggagatcctgcaacggccacggcttcagctgcccaggcacctgcgccagaccattcagaagaaggtcggggagcctgtgaaccttctcatccctttccagggcaagccccggcctcaggtgacctggaccaaagaggggcagcccctggcaggcgaggaggtgagcatccgcaacagccccacagacaccatcctgttcatccgggccgctcgccgcgtgcattcaggcacttaccaggtgacggtgcgcattgagaacatggaggacaaggccacgctggtgctgcaggttgttgacaagccaagtcctccccaggatctccgggtgactgacgcctggggtcttaatgtggctctggagtggaagccaccccaggatgtcggcaacacggagctctgggggtacacagtgcagaaagccgacaagaagaccatggagtggttcaccgtcttggagcattaccgccgcacccactgcgtggtgccagagctcatcattggcaatggctactacttccgcgtcttcagccagaatatggttggctttagtgacagagcggccaccaccaaggagcccgtctttatccccagaccaggcatcacctatgagccacccaactataaggccctggacttctccgaggccccaagcttcacccagcccctggtgaaccgctcggtcatcgcgggctacactgctatgctctgctgtgctgtccggggtagccccaagcccaagatttcctggttcaagaatggcctggacctgggagaagacgcccgcttccgcatgttcagcaagcagggagtgttgactctggagattagaaagccctgcccctttgacgggggcatctatgtctgcagggccaccaacttacagggcgaggcacggtgtgagtgccgcctggaggtgcgagtgcctcagtgacctcgagctgtgccttctagttgccagccatctgttgtttgcccctcccccgtgccttccttgaccctggaaggtgccactcccactgtcctttcctaataaaatgaggaaattgcatcgcattgtctgagtaggtgtcattctattctggggggtggggtggggcaggacagcaagggggaggattgggaagacaatagcaggcatgctggggatgcggtgggctctatgggcggccgcaggaacccctagtgatggagttggccactccctctctgcgcgctcgctcgctcactgaggccgggcgaccaaaggtcgcccgacgcccgggctttgcccgggcggcctcagtgagcgagcgagcgcgcag

SEQ ID NO: 151 - DNA, 4901 bp, synthetic construct
  source 1..4901: mol_type = other DNA
ttggccactccctctctgcgcgctcgctcgctcactgaggccgggcgaccaaaggtcgcccgacgcccgggctttgcccgggcggcctcagtgagcgagcgagcgcgcagagagggagtggccaactccatcactaggggttcctgcggccgcctggaagatgtctttacccccagcatcagttcaagtggagcagcacataactcttgccctctgccttccaagattctggtgctgagacttatggagtgtcttggaggttgccttctgccccccaaccctgctcccagctggccctcccaggcctgggttgctggcctctgctttatcaggattctcaagagggacagctggtttatgttgcatgactgttccctgcatatctgctctggttttaaatagcttatctgagcagctggaggaccacatgggcttatatggcgtggggtacatgttcctgtagccttgtccctggcacctgccaaaatagcagccaacaccccccacccccaccgccatccccctgccccacccgtcccctgtcgcacattcctccctccgcagggctggctcaccaggccccagcccacatgcctgcttaaagccctctccatcctctgcctcacccagtccccgctgagactgagcagacgcctccaggatctgtcggcagctgctgttctgagccaccatgcctgagccggggaagaagccagtctcagcttttagcaagaagccacggtcagtggaagtggccgcaggcagccctgccgtgttcgaggccgagacagagcgggcaggagtgaaggtgcgctggcagcgcggaggcagtgacatcagcgccagcaacaagtacggcctggccacagagggcacacggcatacgctgacagtgcgggaagtgggccctgccgaccagggatcttacgcagtcattgctggctcctccaaggtcaagttcgacctcaaggtcatagaggcagagaaggcagagcccatgctggcccctgcccctgcccctgctgaggccactggagcccctggagaagccccggccccagccgctgagctgggagaaagtgccccaagtcccaaagggtcaagctcagcagctctcaatggtcctacccctggagcccccgatgaccccattggcctcttcgtgatgcggccacaggatggcgaggtgaccgtgggtggcagcatcaccttctcagcccgcgtggccggcgccagcctcctgaagccgcctgtggtcaagtggttcaagggcaaatgggtggacctgagcagcaaggtgggccagcacctgcagctgcacgacagctacgaccgcgccagcaaggtctatctgttcgagctgcacatcaccgatgcccagcctgccttcactggcagctaccgctgtgaggtgtccaccaaggacaaatttgactgctccaacttcaatctcactgtccacgaggccatgggcaccggagacctggacctcctatcagccttccgccgcacgagcctggctggaggtggtcggcggatcagtgatagccatgaggacactgggattctggacttcagctcactgctgaaaaagagagacagtttccggaccccgagggactcgaagctggaggcaccagcagaggaggacgtgtgggagatcctacggcaggcacccccatctgagtacgagcgcatcgccttccagtacggcgtcactgacctgcgcggcatgctaaagaggctcaagggcatgaggcgcgatgagaagaagagcacagcctttcagaagaagctggagccggcctaccaggtgagcaaaggccacaagatccggctgaccgtggaactggctgaccatgacgctgaggtcaaatggctcaagaatggccaggagatccagatgagcggcagcaagtacatctttgagtccatcggtgccaagcgtaccctgaccatcagccagtgctcattggcggacgacgcagcctaccagtgcgtggtgggtggcgagaagtgtagcacggagctctttgtgaaagagccccctgtgctcatcacgcgccccttggaggaccagctggtgatggtggggcagcgggtggagtttgagtgtgaagtatcggaggagggggcgcaagtcaaatggctgaaggacggggtggagctgacccgggaggagaccttcaaataccggttcaagaaggacgggcagagacaccacctgatcatcaacgaggccatgctggaggacgcggggcactatgcactgtgcactagcgggggccaggcgctggctgagctcattgtgcaggaaaagaagctggaggtgtaccagagcatcgcagacctgatggtgggcgcaaaggaccaggcggtgttcaaatgtgaggtctcagatgagaatgttcggggtgtgtggctgaagaatgggaaggagctggtgcccgacagccgcataaaggtgtcccacatcgggcgggtccacaaactgaccattgacgacgtcacacctgccgacgaggctgactacagctttgtgcccgagggcttcgcctgcaacctgtcagccaagctccacttcatggaggtcaagattgacttcgtacccaggcaggaacctcccaagatccacctggactgcccaggccgcataccagacaccattgtggttgtagctggaaataagctacgtctggacgtccctatctctggggaccctgctcccactgtgatctggcagaaggctatcacgcaggggaataaggccccagccaggccagccccagatgccccagaggacacaggtgacagcgatgagtgggtgtttgacaagaagctgctgtgtgagaccgagggccgggtccgcgtggagaccaccaaggaccgcagcatcttcacggtcgagggggcagagaaggaagatgagggcgtctacacggtcacagtgaagaaccctgtgggcgaggaccaggtcaacctcacagtcaaggtcatcgacgtgccagacgcacctgcggcccccaagatcagcaacgtgggagaggactcctgcacagtacagtgggagccgcctgcctacgatggcgggcagcccatcctgggctacatcctggagcgcaagaagaagaagagctaccggtggatgcggctgaacttcgacctgattcaggagctgagtcatgaagcgcggcgcatgatcgagggcgtggtgtacgagatgcgcgtctacgcggtcaacgccatcggcatgtccaggcccagccctgcctcccagcccttcatgcctatcggtccccccagcgaacccacccacctggcagtagaggacgtctctgacaccacggtctccctcaagtggcggcccccagagcgcgtgggagcaggaggcctggatggctacagcgtggagtactgcccagagggctgctcagagtgggtggctgccctgcaggggctgacagagcacacatcgatactggtgaaggacctgcccacgggggcccggctgcttttccgagtgcgggcacacaatatggcagggcctggagcccctgttaccaccacggagccggtgacagtgcaggagatcctgcaacggccacggcttcagctgcccaggcacctgcgccagaccattcagaagaaggtcggggagcctgtgaaccttctcatccctttccagggcaagccccggcctcaggtgacctggaccaaagaggggcagcccctggcaggcgaggaggtgagcatccgcaacagccccacagacaccatcctgttcatccgggccgctcgccgcgtgcattcaggcacttaccaggtgacggtgcgcattgagaacatggaggacaaggccacgctggtgctgcaggttgttgacaagccaagtcctccccaggatctccgggtgactgacgcctggggtcttaatgtggctctggagtggaagccaccccaggatgtcggcaacacggagctctgggggtacacagtgcagaaagccgacaagaagaccatggagtggttcaccgtcttggagcattaccgccgcacccactgcgtggtgccagagctcatcattggcaatggctactacttccgcgtcttcagccagaatatggttggctttagtgacagagcggccaccaccaaggagcccgtctttatccccagaccaggcatcacctatgagccacccaactataaggccctggacttctccgaggccccaagcttcacccagcccctggtgaaccgctcggtcatcgcgggctacactgctatgctctgctgtgctgtccggggtagccccaagcccaagatttcctggttcaagaatggcctggacctgggagaagacgcccgcttccgcatgttcagcaagcagggagtgttgactctggagattagaaagccctgcccctttgacgggggcatctatgtctgcagggccaccaacttacagggcgaggcacggtgtgagtgccgcctggaggtgcgagtgcctcagtgacctcgagctgtgccttctagttgccagccatctgttgtttgcccctcccccgtgccttccttgaccctggaaggtgccactcccactgtcctttcctaataaaatgaggaaattgcatcgcattgtctgagtaggtgtcattctattctggggggtggggtggggcaggacagcaagggggaggattgggaagacaatagcaggcatgctggggatgcggtgggctctatgggcggccgcaggaacccctagtgatggagttggccactccctctctgcgcgctcgctcgctcactgaggccgggcgaccaaaggtcgcccgacgcccgggctttgcccgggcggcctcagtgagcgagcgagcgcgcagagagggagtggccaa

SEQ ID NO: 152 - DNA, 5002 bp, synthetic construct
  source 1..5002: mol_type = other DNA
ctgcgcgctcgctcgctcactgaggccgggcgaccaaaggtcgcccgacgcccgggctttgcccgggcggcctcagtgagcgagcgagcgcgcagagagggagtggccaactccatcactaggggttcctgcggccgcctggaagatgtctttacccccagcatcagttcaagtggagcagcacataactcttgccctctgccttccaagattctggtgctgagacttatggagtgtcttggaggttgccttctgccccccaaccctgctcccagctggccctcccaggcctgggttgctggcctctgctttatcaggattctcaagagggacagctggtttatgttgcatgactgttccctgcatatctgctctggttttaaatagcttatctgagcagctggaggaccacatgggcttatatggcgtggggtacatgttcctgtagccttgtccctggcacctgccaaaatagcagccaacaccccccacccccaccgccatccccctgccccacccgtcccctgtcgcacattcctccctccgcagggctggctcaccaggccccagcccacatgcctgcttaaagccctctccatcctctgcctcacccagtccccgctgagactgagcagacgcctccaggatctgtcggcagctgctgttctgagccaccatgcctgagccggggaagaagccagtctcagcttttagcaagaagccacggtcagtggaagtggccgcaggcagccctgccgtgttcgaggccgagacagagcgggcaggagtgaaggtgcgctggcagcgcggaggcagtgacatcagcgccagcaacaagtacggcctggccacagagggcacacggcatacgctgacagtgcgggaagtgggccctgccgaccagggatcttacgcagtcattgctggctcctccaaggtcaagttcgacctcaaggtcatagaggcaggtaagtactagcagctacaatccagctaccattctgcttttattttatggttgggataaggctggattattctgagtccaagctaggcccttttgctaatcatgttcatacctcttatcttcctcccacagagaaggcagagcccatgctggcccctgcccctgcccctgctgaggccactggagcccctggagaagccccggccccagccgctgagctgggagaaagtgccccaagtcccaaagggtcaagctcagcagctctcaatggtcctacccctggagcccccgatgaccccattggcctcttcgtgatgcggccacaggatggcgaggtgaccgtgggtggcagcatcaccttctcagcccgcgtggccggcgccagcctcctgaagccgcctgtggtcaagtggttcaagggcaaatgggtggacctgagcagcaaggtgggccagcacctgcagctgcacgacagctacgaccgcgccagcaaggtctatctgttcgagctgcacatcaccgatgcccagcctgccttcactggcagctaccgctgtgaggtgtccaccaaggacaaatttgactgctccaacttcaatctcactgtccacgaggccatgggcaccggagacctggacctcctatcagccttccgccgcacgagcctggctggaggtggtcggcggatcagtgatagccatgaggacactgggattctggacttcagctcactgctgaaaaagagagacagtttccggaccccgagggactcgaagctggaggcaccagcagaggaggacgtgtgggagatcctacggcaggcacccccatctgagtacgagcgcatcgccttccagtacggcgtcactgacctgcgcggcatgctaaagaggctcaagggcatgaggcgcgatgagaagaagagcacagcctttcagaagaagctggagccggcctaccaggtgagcaaaggccacaagatccggctgaccgtggaactggctgaccatgacgctgaggtcaaatggctcaagaatggccaggagatccagatgagcggcagcaagtacatctttgagtccatcggtgccaagcgtaccctgaccatcagccagtgctcattggcggacgacgcagcctaccagtgcgtggtgggtggcgagaagtgtagcacggagctctttgtgaaagagccccctgtgctcatcacgcgccccttggaggaccagctggtgatggtggggcagcgggtggagtttgagtgtgaagtatcggaggagggggcgcaagtcaaatggctgaaggacggggtggagctgacccgggaggagaccttcaaataccggttcaagaaggacgggcagagacaccacctgatcatcaacgaggccatgctggaggacgcggggcactatgcactgtgcactagcgggggccaggcgctggctgagctcattgtgcaggaaaagaagctggaggtgtaccagagcatcgcagacctgatggtgggcgcaaaggaccaggcggtgttcaaatgtgaggtctcagatgagaatgttcggggtgtgtggctgaagaatgggaaggagctggtgcccgacagccgcataaaggtgtcccacatcgggcgggtccacaaactgaccattgacgacgtcacacctgccgacgaggctgactacagctttgtgcccgagggcttcgcctgcaacctgtcagccaagctccacttcatggaggtcaagattgacttcgtacccaggcaggaacctcccaagatccacctggactgcccaggccgcataccagacaccattgtggttgtagctggaaataagctacgtctggacgtccctatctctggggaccctgctcccactgtgatctggcagaaggctatcacgcaggggaataaggccccagccaggccagccccagatgccccagaggacacaggtgacagcgatgagtgggtgtttgacaagaagctgctgtgtgagaccgagggccgggtccgcgtggagaccaccaaggaccgcagcatcttcacggtcgagggggcagagaaggaagatgagggcgtctacacggtcacagtgaagaaccctgtgggcgaggaccaggtcaacctcacagtcaaggtcatcgacgtgccagacgcacctgcggcccccaagatcagcaacgtgggagaggactcctgcacagtacagtgggagccgcctgcctacgatggcgggcagcccatcctgggctacatcctggagcgcaagaagaagaagagctaccggtggatgcggctgaacttcgacctgattcaggagctgagtcatgaagcgcggcgcatgatcgagggcgtggtgtacgagatgcgcgtctacgcggtcaacgccatcggcatgtccaggcccagccctgcctcccagcccttcatgcctatcggtccccccagcgaacccacccacctggcagtagaggacgtctctgacaccacggtctccctcaagtggcggcccccagagcgcgtgggagcaggaggcctggatggctacagcgtggagtactgcccagagggctgctcagagtgggtggctgccctgcaggggctgacagagcacacatcgatactggtgaaggacctgcccacgggggcccggctgcttttccgagtgcgggcacacaatatggcagggcctggagcccctgttaccaccacggagccggtgacagtgcaggagatcctgcaacggccacggcttcagctgcccaggcacctgcgccagaccattcagaagaaggtcggggagcctgtgaaccttctcatccctttccagggcaagccccggcctcaggtgacctggaccaaagaggggcagcccctggcaggcgaggaggtgagcatccgcaacagccccacagacaccatcctgttcatccgggccgctcgccgcgtgcattcaggcacttaccaggtgacggtgcgcattgagaacatggaggacaaggccacgctggtgctgcaggttgttgacaagccaagtcctccccaggatctccgggtgactgacgcctggggtcttaatgtggctctggagtggaagccaccccaggatgtcggcaacacggagctctgggggtacacagtgcagaaagccgacaagaagaccatggagtggttcaccgtcttggagcattaccgccgcacccactgcgtggtgccagagctcatcattggcaatggctactacttccgcgtcttcagccagaatatggttggctttagtgacagagcggccaccaccaaggagcccgtctttatccccagaccaggcatcacctatgagccacccaactataaggccctggacttctccgaggccccaagcttcacccagcccctggtgaaccgctcggtcatcgcgggctacactgctatgctctgctgtgctgtccggggtagccccaagcccaagatttcctggttcaagaatggcctggacctgggagaagacgcccgcttccgcatgttcagcaagcagggagtgttgactctggagattagaaagccctgcccctttgacgggggcatctatgtctgcagggccaccaacttacagggcgaggcacggtgtgagtgccgcctggaggtgcgagtgcctcagtgacctcgagctgtgccttctagttgccagccatctgttgtttgcccctcccccgtgccttccttgaccctggaaggtgccactcccactgtcctttcctaataaaatgaggaaattgcatcgcattgtctgagtaggtgtcattctattctggggggtggggtggggcaggacagcaagggggaggattgggaagacaatagcaggcatgctggggatgcggtgggctctatgggcggccgcaggaacccctagtgatggagttggccactccctctctgcgcgctcgctcgctcactgaggccgcccgggcaaagcccgggcgtcgggcgacctttggtcgcccggcctcagtgagcgagcgagcgcgcag

SEQ ID NO: 153 - DNA, 5032 bp, synthetic construct
  source 1..5032: mol_type = other DNA
ttggccactccctctctgcgcgctcgctcgctcactgaggccgggcgaccaaaggtcgcccgacgcccgggctttgcccgggcggcctcagtgagcgagcgagcgcgcagagagggagtggccaactccatcactaggggttcctgcggccgcctggaagatgtctttacccccagcatcagttcaagtggagcagcacataactcttgccctctgccttccaagattctggtgctgagacttatggagtgtcttggaggttgccttctgccccccaaccctgctcccagctggccctcccaggcctgggttgctggcctctgctttatcaggattctcaagagggacagctggtttatgttgcatgactgttccctgcatatctgctctggttttaaatagcttatctgagcagctggaggaccacatgggcttatatggcgtggggtacatgttcctgtagccttgtccctggcacctgccaaaatagcagccaacaccccccacccccaccgccatccccctgccccacccgtcccctgtcgcacattcctccctccgcagggctggctcaccaggccccagcccacatgcctgcttaaagccctctccatcctctgcctcacccagtccccgctgagactgagcagacgcctccaggatctgtcggcagctgctgttctgagccaccatgcctgagccggggaagaagccagtctcagcttttagcaagaagccacggtcagtggaagtggccgcaggcagccctgccgtgttcgaggccgagacagagcgggcaggagtgaaggtgcgctggcagcgcggaggcagtgacatcagcgccagcaacaagtacggcctggccacagagggcacacggcatacgctgacagtgcgggaagtgggccctgccgaccagggatcttacgcagtcattgctggctcctccaaggtcaagttcgacctcaaggtcatagaggcaggtaagtactagcagctacaatccagctaccattctgcttttattttatggttgggataaggctggattattctgagtccaagctaggcccttttgctaatcatgttcatacctcttatcttcctcccacagagaaggcagagcccatgctggcccctgcccctgcccctgctgaggccactggagcccctggagaagccccggccccagccgctgagctgggagaaagtgccccaagtcccaaagggtcaagctcagcagctctcaatggtcctacccctggagcccccgatgaccccattggcctcttcgtgatgcggccacaggatggcgaggtgaccgtgggtggcagcatcaccttctcagcccgcgtggccggcgccagcctcctgaagccgcctgtggtcaagtggttcaagggcaaatgggtggacctgagcagcaaggtgggccagcacctgcagctgcacgacagctacgaccgcgccagcaaggtctatctgttcgagctgcacatcaccgatgcccagcctgccttcactggcagctaccgctgtgaggtgtccaccaaggacaaatttgactgctccaacttcaatctcactgtccacgaggccatgggcaccggagacctggacctcctatcagccttccgccgcacgagcctggctggaggtggtcggcggatcagtgatagccatgaggacactgggattctggacttcagctcactgctgaaaaagagagacagtttccggaccccgagggactcgaagctggaggcaccagcagaggaggacgtgtgggagatcctacggcaggcacccccatctgagtacgagcgcatcgccttccagtacggcgtcactgacctgcgcggcatgctaaagaggctcaagggcatgaggcgcgatgagaagaagagcacagcctttcagaagaagctggagccggcctaccaggtgagcaaaggccacaagatccggctgaccgtggaactggctgaccatgacgctgaggtcaaatggctcaagaatggccaggagatccagatgagcggcagcaagtacatctttgagtccatcggtgccaagcgtaccctgaccatcagccagtgctcattggcggacgacgcagcctaccagtgcgtggtgggtggcgagaagtgtagcacggagctctttgtgaaagagccccctgtgctcatcacgcgccccttggaggaccagctggtgatggtggggcagcgggtggagtttgagtgtgaagtatcggaggagggggcgcaagtcaaatggctgaaggacggggtggagctgacccgggaggagaccttcaaataccggttcaagaaggacgggcagagacaccacctgatcatcaacgaggccatgctggaggacgcggggcactatgcactgtgcactagcgggggccaggcgctggctgagctcattgtgcaggaaaagaagctggaggtgtaccagagcatcgcagacctgatggtgggcgcaaaggaccaggcggtgttcaaatgtgaggtctcagatgagaatgttcggggtgtgtggctgaagaatgggaaggagctggtgcccgacagccgcataaaggtgtcccacatcgggcgggtccacaaactgaccattgacgacgtcacacctgccgacgaggctgactacagctttgtgcccgagggcttcgcctgcaacctgtcagccaagctccacttcatggaggtcaagattgacttcgtacccaggcaggaacctcccaagatccacctggactgcccaggccgcataccagacaccattgtggttgtagctggaaataagctacgtctggacgtccctatctctggggaccctgctcccactgtgatctggcagaaggctatcacgcaggggaataaggccccagccaggccagccccagatgccccagaggacacaggtgacagcgatgagtgggtgtttgacaagaagctgctgtgtgagaccgagggccgggtccgcgtggagaccaccaaggaccgcagcatcttcacggtcgagggggcagagaaggaagatgagggcgtctacacggtcacagtgaagaaccctgtgggcgaggaccaggtcaacctcacagtcaaggtcatcgacgtgccagacgcacctgcggcccccaagatcagcaacgtgggagaggactcctgcacagtacagtgggagccgcctgcctacgatggcgggcagcccatcctgggctacatcctggagcgcaagaagaagaagagctaccggtggatgcggctgaacttcgacctgattcaggagctgagtcatgaagcgcggcgcatgatcgagggcgtggtgtacgagatgcgcgtctacgcggtcaacgccatcggcatgtccaggcccagccctgcctcccagcccttcatgcctatcggtccccccagcgaacccacccacctggcagtagaggacgtctctgacaccacggtctccctcaagtggcggcccccagagcgcgtgggagcaggaggcctggatggctacagcgtggagtactgcccagagggctgctcagagtgggtggctgccctgcaggggctgacagagcacacatcgatactggtgaaggacctgcccacgggggcccggctgcttttccgagtgcgggcacacaatatggcagggcctggagcccctgttaccaccacggagccggtgacagtgcaggagatcctgcaacggccacggcttcagctgcccaggcacctgcgccagaccattcagaagaaggtcggggagcctgtgaaccttctcatccctttccagggcaagccccggcctcaggtgacctggaccaaagaggggcagcccctggcaggcgaggaggtgagcatccgcaacagccccacagacaccatcctgttcatccgggccgctcgccgcgtgcattcaggcacttaccaggtgacggtgcgcattgagaacatggaggacaaggccacgctggtgctgcaggttgttgacaagccaagtcctccccaggatctccgggtgactgacgcctggggtcttaatgtggctctggagtggaagccaccccaggatgtcggcaacacggagctctgggggtacacagtgcagaaagccgacaagaagaccatggagtggttcaccgtcttggagcattaccgccgcacccactgcgtggtgccagagctcatcattggcaatggctactacttccgcgtcttcagccagaatatggttggctttagtgacagagcggccaccaccaaggagcccgtctttatccccagaccaggcatcacctatgagccacccaactataaggccctggacttctccgaggccccaagcttcacccagcccctggtgaaccgctcggtcatcgcgggctacactgctatgctctgctgtgctgtccggggtagccccaagcccaagatttcctggttcaagaatggcctggacctgggagaagacgcccgcttccgcatgttcagcaagcagggagtgttgactctggagattagaaagccctgcccctttgacgggggcatctatgtctgcagggccaccaacttacagggcgaggcacggtgtgagtgccgcctggaggtgcgagtgcctcagtgacctcgagctgtgccttctagttgccagccatctgttgtttgcccctcccccgtgccttccttgaccctggaaggtgccactcccactgtcctttcctaataaaatgaggaaattgcatcgcattgtctgagtaggtgtcattctattctggggggtggggtggggcaggacagcaagggggaggattgggaagacaatagcaggcatgctggggatgcggtgggctctatgggcggccgcaggaacccctagtgatggagttggccactccctctctgcgcgctcgctcgctcactgaggccgcccgggcaaagcccgggcgtcgggcgacctttggtcgcccggcctcagtgagcgagcgagcgcgcagagagggagtggccaa

SEQ ID NO: 154 - DNA, 5002 bp, synthetic construct
  source 1..5002: mol_type = other DNA
ctgcgcgctcgctcgctcactgaggccgcccgggcaaagcccgggcgtcgggcgacctttggtcgcccggcctcagtgagcgagcgagcgcgcagagagggagtggccaactccatcactaggggttcctgcggccgcctggaagatgtctttacccccagcatcagttcaagtggagcagcacataactcttgccctctgccttccaagattctggtgctgagacttatggagtgtcttggaggttgccttctgccccccaaccctgctcccagctggccctcccaggcctgggttgctggcctctgctttatcaggattctcaagagggacagctggtttatgttgcatgactgttccctgcatatctgctctggttttaaatagcttatctgagcagctggaggaccacatgggcttatatggcgtggggtacatgttcctgtagccttgtccctggcacctgccaaaatagcagccaacaccccccacccccaccgccatccccctgccccacccgtcccctgtcgcacattcctccctccgcagggctggctcaccaggccccagcccacatgcctgcttaaagccctctccatcctctgcctcacccagtccccgctgagactgagcagacgcctccaggatctgtcggcagctgctgttctgagccaccatgcctgagccggggaagaagccagtctcagcttttagcaagaagccacggtcagtggaagtggccgcaggcagccctgccgtgttcgaggccgagacagagcgggcaggagtgaaggtgcgctggcagcgcggaggcagtgacatcagcgccagcaacaagtacggcctggccacagagggcacacggcatacgctgacagtgcgggaagtgggccctgccgaccagggatcttacgcagtcattgctggctcctccaaggtcaagttcgacctcaaggtcatagaggcaggtaagtactagcagctacaatccagctaccattctgcttttattttatggttgggataaggctggattattctgagtccaagctaggcccttttgctaatcatgttcatacctcttatcttcctcccacagagaaggcagagcccatgctggcccctgcccctgcccctgctgaggccactggagcccctggagaagccccggccccagccgctgagctgggagaaagtgccccaagtcccaaagggtcaagctcagcagctctcaatggtcctacccctggagcccccgatgaccccattggcctcttcgtgatgcggccacaggatggcgaggtgaccgtgggtggcagcatcaccttctcagcccgcgtggccggcgccagcctcctgaagccgcctgtggtcaagtggttcaagggcaaatgggtggacctgagcagcaaggtgggccagcacctgcagctgcacgacagctacgaccgcgccagcaaggtctatctgttcgagctgcacatcaccgatgcccagcctgccttcactggcagctaccgctgtgaggtgtccaccaaggacaaatttgactgctccaacttcaatctcactgtccacgaggccatgggcaccggagacctggacctcctatcagccttccgccgcacgagcctggctggaggtggtcggcggatcagtgatagccatgaggacactgggattctggacttcagctcactgctgaaaaagagagacagtttccggaccccgagggactcgaagctggaggcaccagcagaggaggacgtgtgggagatcctacggcaggcacccccatctgagtacgagcgcatcgccttccagtacggcgtcactgacctgcgcggcatgctaaagaggctcaagggcatgaggcgcgatgagaagaagagcacagcctttcagaagaagctggagccggcctaccaggtgagcaaaggccacaagatccggctgaccgtggaactggctgaccatgacgctgaggtcaaatggctcaagaatggccaggagatccagatgagcggcagcaagtacatctttgagtccatcggtgccaagcgtaccctgaccatcagccagtgctcattggcggacgacgcagcctaccagtgcgtggtgggtggcgagaagtgtagcacggagctctttgtgaaagagccccctgtgctcatcacgcgccccttggaggaccagctggtgatggtggggcagcgggtggagtttgagtgtgaagtatcggaggagggggcgcaagtcaaatggctgaaggacggggtggagctgacccgggaggagaccttcaaataccggttcaagaaggacgggcagagacaccacctgatcatcaacgaggccatgctggaggacgcggggcactatgcactgtgcactagcgggggccaggcgctggctgagctcattgtgcaggaaaagaagctggaggtgtaccagagcatcgcagacctgatggtgggcgcaaaggaccaggcggtgttcaaatgtgaggtctcagatgagaatgttcggggtgtgtggctgaagaatgggaaggagctggtgcccgacagccgcataaaggtgtcccacatcgggcgggtccacaaactgaccattgacgacgtcacacctgccgacgaggctgactacagctttgtgcccgagggcttcgcctgcaacctgtcagccaagctccacttcatggaggtcaagattgacttcgtacccaggcaggaacctcccaagatccacctggactgcccaggccgcataccagacaccattgtggttgtagctggaaataagctacgtctggacgtccctatctctggggaccctgctcccactgtgatctggcagaaggctatcacgcaggggaataaggccccagccaggccagccccagatgccccagaggacacaggtgacagcgatgagtgggtgtttgacaagaagctgctgtgtgagaccgagggccgggtccgcgtggagaccaccaaggaccgcagcatcttcacggtcgagggggcagagaaggaagatgagggcgtctacacggtcacagtgaagaaccctgtgggcgaggaccaggtcaacctcacagtcaaggtcatcgacgtgccagacgcacctgcggcccccaagatcagcaacgtgggagaggactcctgcacagtacagtgggagccgcctgcctacgatggcgggcagcccatcctgggctacatcctggagcgcaagaagaagaagagctaccggtggatgcggctgaacttcgacctgattcaggagctgagtcatgaagcgcggcgcatgatcgagggcgtggtgtacgagatgcgcgtctacgcggtcaacgccatcggcatgtccaggcccagccctgcctcccagcccttcatgcctatcggtccccccagcgaacccacccacctggcagtagaggacgtctctgacaccacggtctccctcaagtggcggcccccagagcgcgtgggagcaggaggcctggatggctacagcgtggagtactgcccagagggctgctcagagtgggtggctgccctgcaggggctgacagagcacacatcgatactggtgaaggacctgcccacgggggcccggctgcttttccgagtgcgggcacacaatatggcagggcctggagcccctgttaccaccacggagccggtgacagtgcaggagatcctgcaacggccacggcttcagctgcccaggcacctgcgccagaccattcagaagaaggtcggggagcctgtgaaccttctcatccctttccagggcaagccccggcctcaggtgacctggaccaaagaggggcagcccctggcaggcgaggaggtgagcatccgcaacagccccacagacaccatcctgttcatccgggccgctcgccgcgtgcattcaggcacttaccaggtgacggtgcgcattgagaacatggaggacaaggccacgctggtgctgcaggttgttgacaagccaagtcctccccaggatctccgggtgactgacgcctggggtcttaatgtggctctggagtggaagccaccccaggatgtcggcaacacggagctctgggggtacacagtgcagaaagccgacaagaagaccatggagtggttcaccgtcttggagcattaccgccgcacccactgcgtggtgccagagctcatcattggcaatggctactacttccgcgtcttcagccagaatatggttggctttagtgacagagcggccaccaccaaggagcccgtctttatccccagaccaggcatcacctatgagccacccaactataaggccctggacttctccgaggccccaagcttcacccagcccctggtgaaccgctcggtcatcgcgggctacactgctatgctctgctgtgctgtccggggtagccccaagcccaagatttcctggttcaagaatggcctggacctgggagaagacgcccgcttccgcatgttcagcaagcagggagtgttgactctggagattagaaagccctgcccctttgacgggggcatctatgtctgcagggccaccaacttacagggcgaggcacggtgtgagtgccgcctggaggtgcgagtgcctcagtgacctcgagctgtgccttctagttgccagccatctgttgtttgcccctcccccgtgccttccttgaccctggaaggtgccactcccactgtcctttcctaataaaatgaggaaattgcatcgcattgtctgagtaggtgtcattctattctggggggtggggtggggcaggacagcaagggggaggattgggaagacaatagcaggcatgctggggatgcggtgggctctatgggcggccgcaggaacccctagtgatggagttggccactccctctctgcgcgctcgctcgctcactgaggccgcccgggcaaagcccgggcgtcgggcgacctttggtcgcccggcctcagtgagcgagcgagcgcgcag

SEQ ID NO: 155 - DNA, 5032 bp, synthetic construct
  source 1..5032: mol_type = other DNA
ttggccactccctctctgcgcgctcgctcgctcactgaggccgcccgggcaaagcccgggcgtcgggcgacctttggtcgcccggcctcagtgagcgagcgagcgcgcagagagggagtggccaactccatcactaggggttcctgcggccgcctggaagatgtctttacccccagcatcagttcaagtggagcagcacataactcttgccctctgccttccaagattctggtgctgagacttatggagtgtcttggaggttgccttctgccccccaaccctgctcccagctggccctcccaggcctgggttgctggcctctgctttatcaggattctcaagagggacagctggtttatgttgcatgactgttccctgcatatctgctctggttttaaatagcttatctgagcagctggaggaccacatgggcttatatggcgtggggtacatgttcctgtagccttgtccctggcacctgccaaaatagcagccaacaccccccacccccaccgccatccccctgccccacccgtcccctgtcgcacattcctccctccgcagggctggctcaccaggccccagcccacatgcctgcttaaagccctctccatcctctgcctcacccagtccccgctgagactgagcagacgcctccaggatctgtcggcagctgctgttctgagccaccatgcctgagccggggaagaagccagtctcagcttttagcaagaagccacggtcagtggaagtggccgcaggcagccctgccgtgttcgaggccgagacagagcgggcaggagtgaaggtgcgctggcagcgcggaggcagtgacatcagcgccagcaacaagtacggcctggccacagagggcacacggcatacgctgacagtgcgggaagtgggccctgccgaccagggatcttacgcagtcattgctggctcctccaaggtcaagttcgacctcaaggtcatagaggcaggtaagtactagcagctacaatccagctaccattctgcttttattttatggttgggataaggctggattattctgagtccaagctaggcccttttgctaatcatgttcatacctcttatcttcctcccacagagaaggcagagcccatgctggcccctgcccctgcccctgctgaggccactggagcccctggagaagccccggccccagccgctgagctgggagaaagtgccccaagtcccaaagggtcaagctcagcagctctcaatggtcctacccctggagcccccgatgaccccattggcctcttcgtgatgcggccacaggatggcgaggtgaccgtgggtggcagcatcaccttctcagcccgcgtggccggcgccagcctcctgaagccgcctgtggtcaagtggttcaagggcaaatgggtggacctgagcagcaaggtgggccagcacctgcagctgcacgacagctacgaccgcgccagcaaggtctatctgttcgagctgcacatcaccgatgcccagcctgccttcactggcagctaccgctgtgaggtgtccaccaaggacaaatttgactgctccaacttcaatctcactgtccacgaggccatgggcaccggagacctggacctcctatcagccttccgccgcacgagcctggctggaggtggtcggcggatcagtgatagccatgaggacactgggattctggacttcagctcactgctgaaaaagagagacagtttccggaccccgagggactcgaagctggaggcaccagcagaggaggacgtgtgggagatcctacggcaggcacccccatctgagtacgagcgcatcgccttccagtacggcgtcactgacctgcgcggcatgctaaagaggctcaagggcatgaggcgcgatgagaagaagagcacagcctttcagaagaagctggagccggcctaccaggtgagcaaaggccacaagatccggctgaccgtggaactggctgaccatgacgctgaggtcaaatggctcaagaatggccaggagatccagatgagcggcagcaagtacatctttgagtccatcggtgccaagcgtaccctgaccatcagccagtgctcattggcggacgacgcagcctaccagtgcgtggtgggtggcgagaagtgtagcacggagctctttgtgaaagagccccctgtgctcatcacgcgccccttggaggaccagctggtgatggtggggcagcgggtggagtttgagtgtgaagtatcggaggagggggcgcaagtcaaatggctgaaggacggggtggagctgacccgggaggagaccttcaaataccggttcaagaaggacgggcagagacaccacctgatcatcaacgaggccatgctggaggacgcggggcactatgcactgtgcactagcgggggccaggcgctggctgagctcattgtgcaggaaaagaagctggaggtgtaccagagcatcgcagacctgatggtgggcgcaaaggaccaggcggtgttcaaatgtgaggtctcagatgagaatgttcggggtgtgtggctgaagaatgggaaggagctggtgcccgacagccgcataaaggtgtcccacatcgggcgggtccacaaactgaccattgacgacgtcacacctgccgacgaggctgactacagctttgtgcccgagggcttcgcctgcaacctgtcagccaagctccacttcatggaggtcaagattgacttcgtacccaggcaggaacctcccaagatccacctggactgcccaggccgcataccagacaccattgtggttgtagctggaaataagctacgtctggacgtccctatctctggggaccctgctcccactgtgatctggcagaaggctatcacgcaggggaataaggccccagccaggccagccccagatgccccagaggacacaggtgacagcgatgagtgggtgtttgacaagaagctgctgtgtgagaccgagggccgggtccgcgtggagaccaccaaggaccgcagcatcttcacggtcgagggggcagagaaggaagatgagggcgtctacacggtcacagtgaagaaccctgtgggcgaggaccaggtcaacctcacagtcaaggtcatcgacgtgccagacgcacctgcggcccccaagatcagcaacgtgggagaggactcctgcacagtacagtgggagccgcctgcctacgatggcgggcagcccatcctgggctacatcctggagcgcaagaagaagaagagctaccggtggatgcggctgaacttcgacctgattcaggagctgagtcatgaagcgcggcgcatgatcgagggcgtggtgtacgagatgcgcgtctacgcggtcaacgccatcggcatgtccaggcccagccctgcctcccagcccttcatgcctatcggtccccccagcgaacccacccacctggcagtagaggacgtctctgacaccacggtctccctcaagtggcggcccccagagcgcgtgggagcaggaggcctggatggctacagcgtggagtactgcccagagggctgctcagagtgggtggctgccctgcaggggctgacagagcacacatcgatactggtgaaggacctgcccacgggggcccggctgcttttccgagtgcgggcacacaatatggcagggcctggagcccctgttaccaccacggagccggtgacagtgcaggagatcctgcaacggccacggcttcagctgcccaggcacctgcgccagaccattcagaagaaggtcggggagcctgtgaaccttctcatccctttccagggcaagccccggcctcaggtgacctggaccaaagaggggcagcccctggcaggcgaggaggtgagcatccgcaacagccccacagacaccatcctgttcatccgggccgctcgccgcgtgcattcaggcacttaccaggtgacggtgcgcattgagaacatggaggacaaggccacgctggtgctgcaggttgttgacaagccaagtcctccccaggatctccgggtgactgacgcctggggtcttaatgtggctctggagtggaagccaccccaggatgtcggcaacacggagctctgggggtacacagtgcagaaagccgacaagaagaccatggagtggttcaccgtcttggagcattaccgccgcacccactgcgtggtgccagagctcatcattggcaatggctactacttccgcgtcttcagccagaatatggttggctttagtgacagagcggccaccaccaaggagcccgtctttatccccagaccaggcatcacctatgagccacccaactataaggccctggacttctccgaggccccaagcttcacccagcccctggtgaaccgctcggtcatcgcgggctacactgctatgctctgctgtgctgtccggggtagccccaagcccaagatttcctggttcaagaatggcctggacctgggagaagacgcccgcttccgcatgttcagcaagcagggagtgttgactctggagattagaaagccctgcccctttgacgggggcatctatgtctgcagggccaccaacttacagggcgaggcacggtgtgagtgccgcctggaggtgcgagtgcctcagtgacctcgagctgtgccttctagttgccagccatctgttgtttgcccctcccccgtgccttccttgaccctggaaggtgccactcccactgtcctttcctaataaaatgaggaaattgcatcgcattgtctgagtaggtgtcattctattctggggggtggggtggggcaggacagcaagggggaggattgggaagacaatagcaggcatgctggggatgcggtgggctctatgggcggccgcaggaacccctagtgatggagttggccactccctctctgcgcgctcgctcgctcactgaggccgcccgggcaaagcccgggcgtcgggcgacctttggtcgcccggcctcagtgagcgagcgagcgcgcagagagggagtggccaa

SEQ ID NO: 156 - DNA, 5002 bp, synthetic construct
  source 1..5002: mol_type = other DNA
ctgcgcgctcgctcgctcactgaggccgggcgaccaaaggtcgcccgacgcccgggctttgcccgggcggcctcagtgagcgagcgagcgcgcagagagggagtggccaactccatcactaggggttcctgcggccgcctggaagatgtctttacccccagcatcagttcaagtggagcagcacataactcttgccctctgccttccaagattctggtgctgagacttatggagtgtcttggaggttgccttctgccccccaaccctgctcccagctggccctcccaggcctgggttgctggcctctgctttatcaggattctcaagagggacagctggtttatgttgcatgactgttccctgcatatctgctctggttttaaatagcttatctgagcagctggaggaccacatgggcttatatggcgtggggtacatgttcctgtagccttgtccctggcacctgccaaaatagcagccaacaccccccacccccaccgccatccccctgccccacccgtcccctgtcgcacattcctccctccgcagggctggctcaccaggccccagcccacatgcctgcttaaagccctctccatcctctgcctcacccagtccccgctgagactgagcagacgcctccaggatctgtcggcagctgctgttctgagccaccatgcctgagccggggaagaagccagtctcagcttttagcaagaagccacggtcagtggaagtggccgcaggcagccctgccgtgttcgaggccgagacagagcgggcaggagtgaaggtgcgctggcagcgcggaggcagtgacatcagcgccagcaacaagtacggcctggccacagagggcacacggcatacgctgacagtgcgggaagtgggccctgccgaccagggatcttacgcagtcattgctggctcctccaaggtcaagttcgacctcaaggtcatagaggcaggtaagtactagcagctacaatccagctaccattctgcttttattttatggttgggataaggctggattattctgagtccaagctaggcccttttgctaatcatgttcatacctcttatcttcctcccacagagaaggcagagcccatgctggcccctgcccctgcccctgctgaggccactggagcccctggagaagccccggccccagccgctgagctgggagaaagtgccccaagtcccaaagggtcaagctcagcagctctcaatggtcctacccctggagcccccgatgaccccattggcctcttcgtgatgcggccacaggatggcgaggtgaccgtgggtggcagcatcaccttctcagcccgcgtggccggcgccagcctcctgaagccgcctgtggtcaagtggttcaagggcaaatgggtggacctgagcagcaaggtgggccagcacctgcagctgcacgacagctacgaccgcgccagcaaggtctatctgttcgagctgcacatcaccgatgcccagcctgccttcactggcagctaccgctgtgaggtgtccaccaaggacaaatttgactgctccaacttcaatctcactgtccacgaggccatgggcaccggagacctggacctcctatcagccttccgccgcacgagcctggctggaggtggtcggcggatcagtgatagccatgaggacactgggattctggacttcagctcactgctgaaaaagagagacagtttccggaccccgagggactcgaagctggaggcaccagcagaggaggacgtgtgggagatcctacggcaggcacccccatctgagtacgagcgcatcgccttccagtacggcgtcactgacctgcgcggcatgctaaagaggctcaagggcatgaggcgcgatgagaagaagagcacagcctttcagaagaagctggagccggcctaccaggtgagcaaaggccacaagatccggctgaccgtggaactggctgaccatgacgctgaggtcaaatggctcaagaatggccaggagatccagatgagcggcagcaagtacatctttgagtccatcggtgccaagcgtaccctgaccatcagccagtgctcattggcggacgacgcagcctaccagtgcgtggtgggtggcgagaagtgtagcacggagctctttgtgaaagagccccctgtgctcatcacgcgccccttggaggaccagctggtgatggtggggcagcgggtggagtttgagtgtgaagtatcggaggagggggcgcaagtcaaatggctgaaggacggggtggagctgacccgggaggagaccttcaaataccggttcaagaaggacgggcagagacaccacctgatcatcaacgaggccatgctggaggacgcggggcactatgcactgtgcactagcgggggccaggcgctggctgagctcattgtgcaggaaaagaagctggaggtgtaccagagcatcgcagacctgatggtgggcgcaaaggaccaggcggtgttcaaatgtgaggtctcagatgagaatgttcggggtgtgtggctgaagaatgggaaggagctggtgcccgacagccgcataaaggtgtcccacatcgggcgggtccacaaactgaccattgacgacgtcacacctgccgacgaggctgactacagctttgtgcccgagggcttcgcctgcaacctgtcagccaagctccacttcatggaggtcaagattgacttcgtacccaggcaggaacctcccaagatccacctggactgcccaggccgcataccagacaccattgtggttgtagctggaaataagctacgtctggacgtccctatctctggggaccctgctcccactgtgatctggcagaaggctatcacgcaggggaataaggccccagccaggccagccccagatgccccagaggacacaggtgacagcgatgagtgggtgtttgacaagaagctgctgtgtgagaccgagggccgggtccgcgtggagaccaccaaggaccgcagcatcttcacggtcgagggggcagagaaggaagatgagggcgtctacacggtcacagtgaagaaccctgtgggcgaggaccaggtcaacctcacagtcaaggtcatcgacgtgccagacgcacctgcggcccccaagatcagcaacgtgggagaggactcctgcacagtacagtgggagccgcctgcctacgatggcgggcagcccatcctgggctacatcctggagcgcaagaagaagaagagctaccggtggatgcggctgaacttcgacctgattcaggagctgagtcatgaagcgcggcgcatgatcgagggcgtggtgtacgagatgcgcgtctacgcggtcaacgccatcggcatgtccaggcccagccctgcctcccagcccttcatgcctatcggtccccccagcgaacccacccacctggcagtagaggacgtctctgacaccacggtctccctcaagtggcggcccccagagcgcgtgggagcaggaggcctggatggctacagcgtggagtactgcccagagggctgctcagagtgggtggctgccctgcaggggctgacagagcacacatcgatactggtgaaggacctgcccacgggggcccggctgcttttccgagtgcgggcacacaatatggcagggcctggagcccctgttaccaccacggagccggtgacagtgcaggagatcctgcaacggccacggcttcagctgcccaggcacctgcgccagaccattcagaagaaggtcggggagcctgtgaaccttctcatccctttccagggcaagccccggcctcaggtgacctggaccaaagaggggcagcccctggcaggcgaggaggtgagcatccgcaacagccccacagacaccatcctgttcatccgggccgctcgccgcgtgcattcaggcacttaccaggtgacggtgcgcattgagaacatggaggacaaggccacgctggtgctgcaggttgttgacaagccaagtcctccccaggatctccgggtgactgacgcctggggtcttaatgtggctctggagtggaagccaccccaggatgtcggcaacacggagctctgggggtacacagtgcagaaagccgacaagaagaccatggagtggttcaccgtcttggagcattaccgccgcacccactgcgtggtgccagagctcatcattggcaatggctactacttccgcgtcttcagccagaatatggttggctttagtgacagagcggccaccaccaaggagcccgtctttatccccagaccaggcatcacctatgagccacccaactataaggccctggacttctccgaggccccaagcttcacccagcccctggtgaaccgctcggtcatcgcgggctacactgctatgctctgctgtgctgtccggggtagccccaagcccaagatttcctggttcaagaatggcctggacctgggagaagacgcccgcttccgcatgttcagcaagcagggagtgttgactctggagattagaaagccctgcccctttgacgggggcatctatgtctgcagggccaccaacttacagggcgaggcacggtgtgagtgccgcctggaggtgcgagtgcctcagtgacctcgagctgtgccttctagttgccagccatctgttgtttgcccctcccccgtgccttccttgaccctggaaggtgccactcccactgtcctttcctaataaaatgaggaaattgcatcgcattgtctgagtaggtgtcattctattctggggggtggggtggggcaggacagcaagggggaggattgggaagacaatagcaggcatgctggggatgcggtgggctctatgggcggccgcaggaacccctagtgatggagttggccactccctctctgcgcgctcgctcgctcactgaggccgggcgaccaaaggtcgcccgacgcccgggctttgcccgggcggcctcagtgagcgagcgagcgcgcag

SEQ ID NO: 157 - DNA, 5032 bp, synthetic construct
  source 1..5032: mol_type = other DNA
ttggccactccctctctgcgcgctcgctcgctcactgaggccgggcgaccaaaggtcgcccgacgcccgggctttgcccgggcggcctcagtgagcgagcgagcgcgcagagagggagtggccaactccatcactaggggttcctgcggccgcctggaagatgtctttacccccagcatcagttcaagtggagcagcacataactcttgccctctgccttccaagattctggtgctgagacttatggagtgtcttggaggttgccttctgccccccaaccctgctcccagctggccctcccaggcctgggttgctggcctctgctttatcaggattctcaagagggacagctggtttatgttgcatgactgttccctgcatatctgctctggttttaaatagcttatctgagcagctggaggaccacatgggcttatatggcgtggggtacatgttcctgtagccttgtccctggcacctgccaaaatagcagccaacaccccccacccccaccgccatccccctgccccacccgtcccctgtcgcacattcctccctccgcagggctggctcaccaggccccagcccacatgcctgcttaaagccctctccatcctctgcctcacccagtccccgctgagactgagcagacgcctccaggatctgtcggcagctgctgttctgagccaccatgcctgagccggggaagaagccagtctcagcttttagcaagaagccacggtcagtggaagtggccgcaggcagccctgccgtgttcgaggccgagacagagcgggcaggagtgaaggtgcgctggcagcgcggaggcagtgacatcagcgccagcaacaagtacggcctggccacagagggcacacggcatacgctgacagtgcgggaagtgggccctgccgaccagggatcttacgcagtcattgctggctcctccaaggtcaagttcgacctcaaggtcatagaggcaggtaagtactagcagctacaatccagctaccattctgcttttattttatggttgggataaggctggattattctgagtccaagctaggcccttttgctaatcatgttcatacctcttatcttcctcccacagagaaggcagagcccatgctggcccctgcccctgcccctgctgaggccactggagcccctggagaagccccggccccagccgctgagctgggagaaagtgccccaagtcccaaagggtcaagctcagcagctctcaatggtcctacccctggagcccccgatgaccccattggcctcttcgtgatgcggccacaggatggcgaggtgaccgtgggtggcagcatcaccttctcagcccgcgtggccggcgccagcctcctgaagccgcctgtggtcaagtggttcaagggcaaatgggtggacctgagcagcaaggtgggccagcacctgcagctgcacgacagctacgaccgcgccagcaaggtctatctgttcgagctgcacatcaccgatgcccagcctgccttcactggcagctaccgctgtgaggtgtccaccaaggacaaatttgactgctccaacttcaatctcactgtccacgaggccatgggcaccggagacctggacctcctatcagccttccgccgcacgagcctggctggaggtggtcggcggatcagtgatagccatgaggacactgggattctggacttcagctcactgctgaaaaagagagacagtttccggaccccgagggactcgaagctggaggcaccagcagaggaggacgtgtgggagatcctacggcaggcacccccatctgagtacgagcgcatcgccttccagtacggcgtcactgacctgcgcggcatgctaaagaggctcaagggcatgaggcgcgatgagaagaagagcacagcctttcagaagaagctggagccggcctaccaggtgagcaaaggccacaagatccggctgaccgtggaactggctgaccatgacgctgaggtcaaatggctcaagaatggccaggagatccagatgagcggcagcaagtacatctttgagtccatcggtgccaagcgtaccctgaccatcagccagtgctcattggcggacgacgcagcctaccagtgcgtggtgggtggcgagaagtgtagcacggagctctttgtgaaagagccccctgtgctcatcacgcgccccttggaggaccagctggtgatggtggggcagcgggtggagtttgagtgtgaagtatcggaggagggggcgcaagtcaaatggctgaaggacggggtggagctgacccgggaggagaccttcaaataccggttcaagaaggacgggcagagacaccacctgatcatcaacgaggccatgctggaggacgcggggcactatgcactgtgcactagcgggggccaggcgctggctgagctcattgtgcaggaaaagaagctggaggtgtaccagagcatcgcagacctgatggtgggcgcaaaggaccaggcggtgttcaaatgtgaggtctcagatgagaatgttcggggtgtgtggctgaagaatgggaaggagctggtgcccgacagccgcataaaggtgtcccacatcgggcgggtccacaaactgaccattgacgacgtcacacctgccgacgaggctgactacagctttgtgcccgagggcttcgcctgcaacctgtcagccaagctccacttcatggaggtcaagattgacttcgtacccaggcaggaacctcccaagatccacctggactgcccaggccgcataccagacaccattgtggttgtagctggaaataagctacgtctggacgtccctatctctggggaccctgctcccactgtgatctggcagaaggctatcacgcaggggaataaggccccagccaggccagccccagatgccccagaggacacaggtgacagcgatgagtgggtgtttgacaagaagctgctgtgtgagaccgagggccgggtccgcgtggagaccaccaaggaccgcagcatcttcacggtcgagggggcagagaaggaagatgagggcgtctacacggtcacagtgaagaaccctgtgggcgaggaccaggtcaacctcacagtcaaggtcatcgacgtgccagacgcacctgcggcccccaagatcagcaacgtgggagaggactcctgcacagtacagtgggagccgcctgcctacgatggcgggcagcccatcctgggctacatcctggagcgcaagaagaagaagagctaccggtggatgcggctgaacttcgacctgattcaggagctgagtcatgaagcgcggcgcatgatcgagggcgtggtgtacgagatgcgcgtctacgcggtcaacgccatcggcatgtccaggcccagccctgcctcccagcccttcatgcctatcggtccccccagcgaacccacccacctggcagtagaggacgtctctgacaccacggtctccctcaagtggcggcccccagagcgcgtgggagcaggaggcctggatggctacagcgtggagtactgcccagagggctgctcagagtgggtggctgccctgcaggggctgacagagcacacatcgatactggtgaaggacctgcccacgggggcccggctgcttttccgagtgcgggcacacaatatggcagggcctggagcccctgttaccaccacggagccggtgacagtgcaggagatcctgcaacggccacggcttcagctgcccaggcacctgcgccagaccattcagaagaaggtcggggagcctgtgaaccttctcatccctttccagggcaagccccggcctcaggtgacctggaccaaagaggggcagcccctggcaggcgaggaggtgagcatccgcaacagccccacagacaccatcctgttcatccgggccgctcgccgcgtgcattcaggcacttaccaggtgacggtgcgcattgagaacatggaggacaaggccacgctggtgctgcaggttgttgacaagccaagtcctccccaggatctccgggtgactgacgcctggggtcttaatgtggctctggagtggaagccaccccaggatgtcggcaacacggagctctgggggtacacagtgcagaaagccgacaagaagaccatggagtggttcaccgtcttggagcattaccgccgcacccactgcgtggtgccagagctcatcattggcaatggctactacttccgcgtcttcagccagaatatggttggctttagtgacagagcggccaccaccaaggagcccgtctttatccccagaccaggcatcacctatgagccacccaactataaggccctggacttctccgaggccccaagcttcacccagcccctggtgaaccgctcggtcatcgcgggctacactgctatgctctgctgtgctgtccggggtagccccaagcccaagatttcctggttcaagaatggcctggacctgggagaagacgcccgcttccgcatgttcagcaagcagggagtgttgactctggagattagaaagccctgcccctttgacgggggcatctatgtctgcagggccaccaacttacagggcgaggcacggtgtgagtgccgcctggaggtgcgagtgcctcagtgacctcgagctgtgccttctagttgccagccatctgttgtttgcccctcccccgtgccttccttgaccctggaaggtgccactcccactgtcctttcctaataaaatgaggaaattgcatcgcattgtctgagtaggtgtcattctattctggggggtggggtggggcaggacagcaagggggaggattgggaagacaatagcaggcatgctggggatgcggtgggctctatgggcggccgcaggaacccctagtgatggagttggccactccctctctgcgcgctcgctcgctcactgaggccgggcgaccaaaggtcgcccgacgcccgggctttgcccgggcggcctcagtgagcgagcgagcgcgcagagagggagtggccaa

SEQ ID NO: 158 - DNA, 4781 bp, synthetic construct
  source 1..4781: mol_type = other DNA
ctgcgcgctcgctcgctcactgaggccgggcgaccaaaggtcgcccgacgcccgggctttgcccgggcggcctcagtgagcgagcgagcgcgcagagagggagtggccaactccatcactaggggttcctgcggccgcccttccaagattctggtgctgagacttatggagtgtcttggaggttgccttctgccccccaaccctgctcccagctggccctcccaggcctgggttgctggcctctgctttatcaggattctcaagagggacagctggtttatgttgcatgactgttccctgcatatctgctctggttttaaatagcttatctgagcagctggaggaccacatgggcttatatggcgtggggtacatgttcctgtagccttgtccctggcacctgccaaaatagcagccaacaccccccacccccaccgccatccccctgccccacccgtcccctgtcgcacattcctccctccgcagggctggctcaccaggccccagcccacatgcctgcttaaagccctctccatcctctgcctcacccagtccccgctgagactgagcagacgcctccaggatctgtcggcagctgctgttctgagccaccatgcctgagccggggaagaagccagtctcagcttttagcaagaagccacggtcagtggaagtggccgcaggcagccctgccgtgttcgaggccgagacagagcgggcaggagtgaaggtgcgctggcagcgcggaggcagtgacatcagcgccagcaacaagtacggcctggccacagagggcacacggcatacgctgacagtgcgggaagtgggccctgccgaccagggatcttacgcagtcattgctggctcctccaaggtcaagttcgacctcaaggtcatagaggcaggtaagtactagcagctacaatccagctaccattctgcttttattttatggttgggataaggctggattattctgagtccaagctaggcccttttgctaatcatgttcatacctcttatcttcctcccacagagaaggcagagcccatgctggcccctgcccctgcccctgctgaggccactggagcccctggagaagccccggccccagccgctgagctgggagaaagtgccccaagtcccaaagggtcaagctcagcagctctcaatggtcctacccctggagcccccgatgaccccattggcctcttcgtgatgcggccacaggatggcgaggtgaccgtgggtggcagcatcaccttctcagcccgcgtggccggcgccagcctcctgaagccgcctgtggtcaagtggttcaagggcaaatgggtggacctgagcagcaaggtgggccagcacctgcagctgcacgacagctacgaccgcgccagcaaggtctatctgttcgagctgcacatcaccgatgcccagcctgccttcactggcagctaccgctgtgaggtgtccaccaaggacaaatttgactgctccaacttcaatctcactgtccacgaggccatgggcaccggagacctggacctcctatcagccttccgccgcacgagcctggctggaggtggtcggcggatcagtgatagccatgaggacactgggattctggacttcagctcactgctgaaaaagagagacagtttccggaccccgagggactcgaagctggaggcaccagcagaggaggacgtgtgggagatcctacggcaggcacccccatctgagtacgagcgcatcgccttccagtacggcgtcactgacctgcgcggcatgctaaagaggctcaagggcatgaggcgcgatgagaagaagagcacagcctttcagaagaagctggagccggcctaccaggtgagcaaaggccacaagatccggctgaccgtggaactggctgaccatgacgctgaggtcaaatggctcaagaatggccaggagatccagatgagcggcagcaagtacatctttgagtccatcggtgccaagcgtaccctgaccatcagccagtgctcattggcggacgacgcagcctaccagtgcgtggtgggtggcgagaagtgtagcacggagctctttgtgaaagagccccctgtgctcatcacgcgccccttggaggaccagctggtgatggtggggcagcgggtggagtttgagtgtgaagtatcggaggagggggcgcaagtcaaatggctgaaggacggggtggagctgacccgggaggagaccttcaaataccggttcaagaaggacgggcagagacaccacctgatcatcaacgaggccatgctggaggacgcggggcactatgcactgtgcactagcgggggccaggcgctggctgagctcattgtgcaggaaaagaagctggaggtgtaccagagcatcgcagacctgatggtgggcgcaaaggaccaggcggtgttcaaatgtgaggtctcagatgagaatgttcggggtgtgtggctgaagaatgggaaggagctggtgcccgacagccgcataaaggtgtcccacatcgggcgggtccacaaactgaccattgacgacgtcacacctgccgacgaggctgactacagctttgtgcccgagggcttcgcctgcaacctgtcagccaagctccacttcatggaggtcaagattgacttcgtacccaggcaggaacctcccaagatccacctggactgcccaggccgcataccagacaccattgtggttgtagctggaaataagctacgtctggacgtccctatctctggggaccctgctcccactgtgatctggcagaaggctatcacgcaggggaataaggccccagccaggccagccccagatgccccagaggacacaggtgacagcgatgagtgggtgtttgacaagaagctgctgtgtgagaccgagggccgggtccgcgtggagaccaccaaggaccgcagcatcttcacggtcgagggggcagagaaggaagatgagggcgtctacacggtcacagtgaagaaccctgtgggcgaggaccaggtcaacctcacagtcaaggtcatcgacgtgccagacgcacctgcggcccccaagatcagcaacgtgggagaggactcctgcacagtacagtgggagccgcctgcctacgatggcgggcagcccatcctgggctacatcctggagcgcaagaagaagaagagctaccggtggatgcggctgaacttcgacctgattcaggagctgagtcatgaagcgcggcgcatgatcgagggcgtggtgtacgagatgcgcgtctacgcggtcaacgccatcggcatgtccaggcccagccctgcctcccagcccttcatgcctatcggtccccccagcgaacccacccacctggcagtagaggacgtctctgacaccacggtctccctcaagtggcggcccccagagcgcgtgggagcaggaggcctggatggctacagcgtggagtactgcccagagggctgctcagagtgggtggctgccctgcaggggctgacagagcacacatcgatactggtgaaggacctgcccacgggggcccggctgcttttccgagtgcgggcacacaatatggcagggcctggagcccctgttaccaccacggagccggtgacagtgcaggagatcctgcaacggccacggcttcagctgcccaggcacctgcgccagaccattcagaagaaggtcggggagcctgtgaaccttctcatccctttccagggcaagccccggcctcaggtgacctggaccaaagaggggcagcccctggcaggcgaggaggtgagcatccgcaacagccccacagacaccatcctgttcatccgggccgctcgccgcgtgcattcaggcacttaccaggtgacggtgcgcattgagaacatggaggacaaggccacgctggtgctgcaggttgttgacaagccaagtcctccccaggatctccgggtgactgacgcctggggtcttaatgtggctctggagtggaagccaccccaggatgtcggcaacacggagctctgggggtacacagtgcagaaagccgacaagaagaccatggagtggttcaccgtcttggagcattaccgccgcacccactgcgtggtgccagagctcatcattggcaatggctactacttccgcgtcttcagccagaatatggttggctttagtgacagagcggccaccaccaaggagcccgtctttatccccagaccaggcatcacctatgagccacccaactataaggccctggacttctccgaggccccaagcttcacccagcccctggtgaaccgctcggtcatcgcgggctacactgctatgctctgctgtgctgtccggggtagccccaagcccaagatttcctggttcaagaatggcctggacctgggagaagacgcccgcttccgcatgttcagcaagcagggagtgttgactctggagattagaaagccctgcccctttgacgggggcatctatgtctgcagggccaccaacttacagggcgaggcacggtgtgagtgccgcctggaggtgcgagtgcctcagtgacctcgagccaataaaggatcgtttattttcattggaagcgtgtgttggttttttgatcaggcgcgtccaagcttgcggccgcaggaacccctagtgatggagttggccactccctctctgcgcgctcgctcgctcactgaggccgcccgggcaaagcccgggcgtcgggcgacctttggtcgcccggcctcagtgagcgagcgagcgcgcag

SEQ ID NO: 159 - DNA, 4811 bp, synthetic construct
  source 1..4811: mol_type = other DNA
ttggccactccctctctgcgcgctcgctcgctcactgaggccgggcgaccaaaggtcgcccgacgcccgggctttgcccgggcggcctcagtgagcgagcgagcgcgcagagagggagtggccaactccatcactaggggttcctgcggccgcccttccaagattctggtgctgagacttatggagtgtcttggaggttgccttctgccccccaaccctgctcccagctggccctcccaggcctgggttgctggcctctgctttatcaggattctcaagagggacagctggtttatgttgcatgactgttccctgcatatctgctctggttttaaatagcttatctgagcagctggaggaccacatgggcttatatggcgtggggtacatgttcctgtagccttgtccctggcacctgccaaaatagcagccaacaccccccacccccaccgccatccccctgccccacccgtcccctgtcgcacattcctccctccgcagggctggctcaccaggccccagcccacatgcctgcttaaagccctctccatcctctgcctcacccagtccccgctgagactgagcagacgcctccaggatctgtcggcagctgctgttctgagccaccatgcctgagccggggaagaagccagtctcagcttttagcaagaagccacggtcagtggaagtggccgcaggcagccctgccgtgttcgaggccgagacagagcgggcaggagtgaaggtgcgctggcagcgcggaggcagtgacatcagcgccagcaacaagtacggcctggccacagagggcacacggcatacgctgacagtgcgggaagtgggccctgccgaccagggatcttacgcagtcattgctggctcctccaaggtcaagttcgacctcaaggtcatagaggcaggtaagtactagcagctacaatccagctaccattctgcttttattttatggttgggataaggctggattattctgagtccaagctaggcccttttgctaatcatgttcatacctcttatcttcctcccacagagaaggcagagcccatgctggcccctgcccctgcccctgctgaggccactggagcccctggagaagccccggccccagccgctgagctgggagaaagtgccccaagtcccaaagggtcaagctcagcagctctcaatggtcctacccctggagcccccgatgaccccattggcctcttcgtgatgcggccacaggatggcgaggtgaccgtgggtggcagcatcaccttctcagcccgcgtggccggcgccagcctcctgaagccgcctgtggtcaagtggttcaagggcaaatgggtggacctgagcagcaaggtgggccagcacctgcagctgcacgacagctacgaccgcgccagcaaggtctatctgttcgagctgcacatcaccgatgcccagcctgccttcactggcagctaccgctgtgaggtgtccaccaaggacaaatttgactgctccaacttcaatctcactgtccacgaggccatgggcaccggagacctggacctcctatcagccttccgccgcacgagcctggctggaggtggtcggcggatcagtgatagccatgaggacactgggattctggacttcagctcactgctgaaaaagagagacagtttccggaccccgagggactcgaagctggaggcaccagcagaggaggacgtgtgggagatcctacggcaggcacccccatctgagtacgagcgcatcgccttccagtacggcgtcactgacctgcgcggcatgctaaagaggctcaagggcatgaggcgcgatgagaagaagagcacagcctttcagaagaagctggagccggcctaccaggtgagcaaaggccacaagatccggctgaccgtggaactggctgaccatgacgctgaggtcaaatggctcaagaatggccaggagatccagatgagcggcagcaagtacatctttgagtccatcggtgccaagcgtaccctgaccatcagccagtgctcattggcggacgacgcagcctaccagtgcgtggtgggtggcgagaagtgtagcacggagctctttgtgaaagagccccctgtgctcatcacgcgccccttggaggaccagctggtgatggtggggcagcgggtggagtttgagtgtgaagtatcggaggagggggcgcaagtcaaatggctgaaggacggggtggagctgacccgggaggagaccttcaaataccggttcaagaaggacgggcagagacaccacctgatcatcaacgaggccatgctggaggacgcggggcactatgcactgtgcactagcgggggccaggcgctggctgagctcattgtgcaggaaaagaagctggaggtgtaccagagcatcgcagacctgatggtgggcgcaaaggaccaggcggtgttcaaatgtgaggtctcagatgagaatgttcggggtgtgtggctgaagaatgggaaggagctggtgcccgacagccgcataaaggtgtcccacatcgggcgggtccacaaactgaccattgacgacgtcacacctgccgacgaggctgactacagctttgtgcccgagggcttcgcctgcaacctgtcagccaagctccacttcatggaggtcaagattgacttcgtacccaggcaggaacctcccaagatccacctggactgcccaggccgcataccagacaccattgtggttgtagctggaaataagctacgtctggacgtccctatctctggggaccctgctcccactgtgatctggcagaaggctatcacgcaggggaataaggccccagccaggccagccccagatgccccagaggacacaggtgacagcgatgagtgggtgtttgacaagaagctgctgtgtgagaccgagggccgggtccgcgtggagaccaccaaggaccgcagcatcttcacggtcgagggggcagagaaggaagatgagggcgtctacacggtcacagtgaagaaccctgtgggcgaggaccaggtcaacctcacagtcaaggtcatcgacgtgccagacgcacctgcggcccccaagatcagcaacgtgggagaggactcctgcacagtacagtgggagccgcctgcctacgatggcgggcagcccatcctgggctacatcctggagcgcaagaagaagaagagctaccggtggatgcggctgaacttcgacctgattcaggagctgagtcatgaagcgcggcgcatgatcgagggcgtggtgtacgagatgcgcgtctacgcggtcaacgccatcggcatgtccaggcccagccctgcctcccagcccttcatgcctatcggtccccccagcgaacccacccacctggcagtagaggacgtctctgacaccacggtctccctcaagtggcggcccccagagcgcgtgggagcaggaggcctggatggctacagcgtggagtactgcccagagggctgctcagagtgggtggctgccctgcaggggctgacagagcacacatcgatactggtgaaggacctgcccacgggggcccggctgcttttccgagtgcgggcacacaatatggcagggcctggagcccctgttaccaccacggagccggtgacagtgcaggagatcctgcaacggccacggcttcagctgcccaggcacctgcgccagaccattcagaagaaggtcggggagcctgtgaaccttctcatccctttccagggcaagccccggcctcaggtgacctggaccaaagaggggcagcccctggcaggcgaggaggtgagcatccgcaacagccccacagacaccatcctgttcatccgggccgctcgccgcgtgcattcaggcacttaccaggtgacggtgcgcattgagaacatggaggacaaggccacgctggtgctgcaggttgttgacaagccaagtcctccccaggatctccgggtgactgacgcctggggtcttaatgtggctctggagtggaagccaccccaggatgtcggcaacacggagctctgggggtacacagtgcagaaagccgacaagaagaccatggagtggttcaccgtcttggagcattaccgccgcacccactgcgtggtgccagagctcatcattggcaatggctactacttccgcgtcttcagccagaatatggttggctttagtgacagagcggccaccaccaaggagcccgtctttatccccagaccaggcatcacctatgagccacccaactataaggccctggacttctccgaggccccaagcttcacccagcccctggtgaaccgctcggtcatcgcgggctacactgctatgctctgctgtgctgtccggggtagccccaagcccaagatttcctggttcaagaatggcctggacctgggagaagacgcccgcttccgcatgttcagcaagcagggagtgttgactctggagattagaaagccctgcccctttgacgggggcatctatgtctgcagggccaccaacttacagggcgaggcacggtgtgagtgccgcctggaggtgcgagtgcctcagtgacctcgagccaataaaggatcgtttattttcattggaagcgtgtgttggttttttgatcaggcgcgtccaagcttgcggccgcaggaacccctagtgatggagttggccactccctctctgcgcgctcgctcgctcactgaggccgcccgggcaaagcccgggcgtcgggcgacctttggtcgcccggcctcagtgagcgagcgagcgcgcagagagggagtggccaa

SEQ ID NO: 160 - DNA, 4781 bp, synthetic construct
  source 1..4781: mol_type = other DNA
ctgcgcgctcgctcgctcactgaggccgcccgggcaaagcccgggcgtcgggcgacctttggtcgcccggcctcagtgagcgagcgagcgcgcagagagggagtggccaactccatcactaggggttcctgcggccgcccttccaagattctggtgctgagacttatggagtgtcttggaggttgccttctgccccccaaccctgctcccagctggccctcccaggcctgggttgctggcctctgctttatcaggattctcaagagggacagctggtttatgttgcatgactgttccctgcatatctgctctggttttaaatagcttatctgagcagctggaggaccacatgggcttatatggcgtggggtacatgttcctgtagccttgtccctggcacctgccaaaatagcagccaacaccccccacccccaccgccatccccctgccccacccgtcccctgtcgcacattcctccctccgcagggctggctcaccaggccccagcccacatgcctgcttaaagccctctccatcctctgcctcacccagtccccgctgagactgagcagacgcctccaggatctgtcggcagctgctgttctgagccaccatgcctgagccggggaagaagccagtctcagcttttagcaagaagccacggtcagtggaagtggccgcaggcagccctgccgtgttcgaggccgagacagagcgggcaggagtgaaggtgcgctggcagcgcggaggcagtgacatcagcgccagcaacaagtacggcctggccacagagggcacacggcatacgctgacagtgcgggaagtgggccctgccgaccagggatcttacgcagtcattgctggctcctccaaggtcaagttcgacctcaaggtcatagaggcaggtaagtactagcagctacaatccagctaccattctgcttttattttatggttgggataaggctggattattctgagtccaagctaggcccttttgctaatcatgttcatacctcttatcttcctcccacagagaaggcagagcccatgctggcccctgcccctgcccctgctgaggccactggagcccctggagaagccccggccccagccgctgagctgggagaaagtgccccaagtcccaaagggtcaagctcagcagctctcaatggtcctacccctggagcccccgatgaccccattggcctcttcgtgatgcggccacaggatggcgaggtgaccgtgggtggcagcatcaccttctcagcccgcgtggccggcgccagcctcctgaagccgcctgtggtcaagtggttcaagggcaaatgggtggacctgagcagcaaggtgggccagcacctgcagctgcacgacagctacgaccgcgccagcaaggtctatctgttcgagctgcacatcaccgatgcccagcctgccttcactggcagctaccgctgtgaggtgtccaccaaggacaaatttgactgctccaacttcaatctcactgtccacgaggccatgggcaccggagacctggacctcctatcagccttccgccgcacgagcctggctggaggtggtcggcggatcagtgatagccatgaggacactgggattctggacttcagctcactgctgaaaaagagagacagtttccggaccccgagggactcgaagctggaggcaccagcagaggaggacgtgtgggagatcctacggcaggcacccccatctgagtacgagcgcatcgccttccagtacggcgtcactgacctgcgcggcatgctaaagaggctcaagggcatgaggcgcgatgagaagaagagcacagcctttcagaagaagctggagccggcctaccaggtgagcaaaggccacaagatccggctgaccgtggaactggctgaccatgacgctgaggtcaaatggctcaagaatggccaggagatccagatgagcggcagcaagtacatctttgagtccatcggtgccaagcgtaccctgaccatcagccagtgctcattggcggacgacgcagcctaccagtgcgtggtgggtggcgagaagtgtagcacggagctctttgtgaaagagccccctgtgctcatcacgcgccccttggaggaccagctggtgatggtggggcagcgggtggagtttgagtgtgaagtatcggaggagggggcgcaagtcaaatggctgaaggacggggtggagctgacccgggaggagaccttcaaataccggttcaagaaggacgggcagagacaccacctgatcatcaacgaggccatgctggaggacgcggggcactatgcactgtgcactagcgggggccaggcgctggctgagctcattgtgcaggaaaagaagctggaggtgtaccagagcatcgcagacctgatggtgggcgcaaaggaccaggcggtgttcaaatgtgaggtctcagatgagaatgttcggggtgtgtggctgaagaatgggaaggagctggtgcccgacagccgcataaaggtgtcccacatcgggcgggtccacaaactgaccattgacgacgtcacacctgccgacgaggctgactacagctttgtgcccgagggcttcgcctgcaacctgtcagccaagctccacttcatggaggtcaagattgacttcgtacccaggcaggaacctcccaagatccacctggactgcccaggccgcataccagacaccattgtggttgtagctggaaataagctacgtctggacgtccctatctctggggaccctgctcccactgtgatctggcagaaggctatcacgcaggggaataaggccccagccaggccagccccagatgccccagaggacacaggtgacagcgatgagtgggtgtttgacaagaagctgctgtgtgagaccgagggccgggtccgcgtggagaccaccaaggaccgcagcatcttcacggtcgagggggcagagaaggaagatgagggcgtctacacggtcacagtgaagaaccctgtgggcgaggaccaggtcaacctcacagtcaaggtcatcgacgtgccagacgcacctgcggcccccaagatcagcaacgtgggagaggactcctgcacagtacagtgggagccgcctgcctacgatggcgggcagcccatcctgggctacatcctggagcgcaagaagaagaagagctaccggtggatgcggctgaacttcgacctgattcaggagctgagtcatgaagcgcggcgcatgatcgagggcgtggtgtacgagatgcgcgtctacgcggtcaacgccatcggcatgtccaggcccagccctgcctcccagcccttcatgcctatcggtccccccagcgaacccacccacctggcagtagaggacgtctctgacaccacggtctccctcaagtggcggcccccagagcgcgtgggagcaggaggcctggatggctacagcgtggagtactgcccagagggctgctcagagtgggtggctgccctgcaggggctgacagagcacacatcgatactggtgaaggacctgcccacgggggcccggctgcttttccgagtgcgggcacacaatatggcagggcctggagcccctgttaccaccacggagccggtgacagtgcaggagatcctgcaacggccacggcttcagctgcccaggcacctgcgccagaccattcagaagaaggtcggggagcctgtgaaccttctcatccctttccagggcaagccccggcctcaggtgacctggaccaaagaggggcagcccctggcaggcgaggaggtgagcatccgcaacagccccacagacaccatcctgttcatccgggccgctcgccgcgtgcattcaggcacttaccaggtgacggtgcgcattgagaacatggaggacaaggccacgctggtgctgcaggttgttgacaagccaagtcctccccaggatctccgggtgactgacgcctggggtcttaatgtggctctggagtggaagccaccccaggatgtcggcaacacggagctctgggggtacacagtgcagaaagccgacaagaagaccatggagtggttcaccgtcttggagcattaccgccgcacccactgcgtggtgccagagctcatcattggcaatggctactacttccgcgtcttcagccagaatatggttggctttagtgacagagcggccaccaccaaggagcccgtctttatccccagaccaggcatcacctatgagccacccaactataaggccctggacttctccgaggccccaagcttcacccagcccctggtgaaccgctcggtcatcgcgggctacactgctatgctctgctgtgctgtccggggtagccccaagcccaagatttcctggttcaagaatggcctggacctgggagaagacgcccgcttccgcatgttcagcaagcagggagtgttgactctggagattagaaagccctgcccctttgacgggggcatctatgtctgcagggccaccaacttacagggcgaggcacggtgtgagtgccgcctggaggtgcgagtgcctcagtgacctcgagccaataaaggatcgtttattttcattggaagcgtgtgttggttttttgatcaggcgcgtccaagcttgcggccgcaggaacccctagtgatggagttggccactccctctctgcgcgctcgctcgctcactgaggccgcccgggcaaagcccgggcgtcgggcgacctttggtcgcccggcctcagtgagcgagcgagcgcgcag

SEQ ID NO: 161 - DNA, 4811 bp, synthetic construct
  source 1..4811: mol_type = other DNA
ttggccactccctctctgcgcgctcgctcgctcactgaggccgcccgggcaaagcccgggcgtcgggcgacctttggtcgcccggcctcagtgagcgagcgagcgcgcagagagggagtggccaactccatcactaggggttcctgcggccgcccttccaagattctggtgctgagacttatggagtgtcttggaggttgccttctgccccccaaccctgctcccagctggccctcccaggcctgggttgctggcctctgctttatcaggattctcaagagggacagctggtttatgttgcatgactgttccctgcatatctgctctggttttaaatagcttatctgagcagctggaggaccacatgggcttatatggcgtggggtacatgttcctgtagccttgtccctggcacctgccaaaatagcagccaacaccccccacccccaccgccatccccctgccccacccgtcccctgtcgcacattcctccctccgcagggctggctcaccaggccccagcccacatgcctgcttaaagccctctccatcctctgcctcacccagtccccgctgagactgagcagacgcctccaggatctgtcggcagctgctgttctgagccaccatgcctgagccggggaagaagccagtctcagcttttagcaagaagccacggtcagtggaagtggccgcaggcagccctgccgtgttcgaggccgagacagagcgggcaggagtgaaggtgcgctggcagcgcggaggcagtgacatcagcgccagcaacaagtacggcctggccacagagggcacacggcatacgctgacagtgcgggaagtgggccctgccgaccagggatcttacgcagtcattgctggctcctccaaggtcaagttcgacctcaaggtcatagaggcaggtaagtactagcagctacaatccagctaccattctgcttttattttatggttgggataaggctggattattctgagtccaagctaggcccttttgctaatcatgttcatacctcttatcttcctcccacagagaaggcagagcccatgctggcccctgcccctgcccctgctgaggccactggagcccctggagaagccccggccccagccgctgagctgggagaaagtgccccaagtcccaaagggtcaagctcagcagctctcaatggtcctacccctggagcccccgatgaccccattggcctcttcgtgatgcggccacaggatggcgaggtgaccgtgggtggcagcatcaccttctcagcccgcgtggccggcgccagcctcctgaagccgcctgtggtcaagtggttcaagggcaaatgggtggacctgagcagcaaggtgggccagcacctgcagctgcacgacagctacgaccgcgccagcaaggtctatctgttcgagctgcacatcaccgatgcccagcctgccttcactggcagctaccgctgtgaggtgtccaccaaggacaaatttgactgctccaacttcaatctcactgtccacgaggccatgggcaccggagacctggacctcctatcagccttccgccgcacgagcctggctggaggtggtcggcggatcagtgatagccatgaggacactgggattctggacttcagctcactgctgaaaaagagagacagtttccggaccccgagggactcgaagctggaggcaccagcagaggaggacgtgtgggagatcctacggcaggcacccccatctgagtacgagcgcatcgccttccagtacggcgtcactgacctgcgcggcatgctaaagaggctcaagggcatgaggcgcgatgagaagaagagcacagcctttcagaagaagctggagccggcctaccaggtgagcaaaggccacaagatccggctgaccgtggaactggctgaccatgacgctgaggtcaaatggctcaagaatggccaggagatccagatgagcggcagcaagtacatctttgagtccatcggtgccaagcgtaccctgaccatcagccagtgctcattggcggacgacgcagcctaccagtgcgtggtgggtggcgagaagtgtagcacggagctctttgtgaaagagccccctgtgctcatcacgcgccccttggaggaccagctggtgatggtggggcagcgggtggagtttgagtgtgaagtatcggaggagggggcgcaagtcaaatggctgaaggacggggtggagctgacccgggaggagaccttcaaataccggttcaagaaggacgggcagagacaccacctgatcatcaacgaggccatgctggaggacgcggggcactatgcactgtgcactagcgggggccaggcgctggctgagctcattgtgcaggaaaagaagctggaggtgtaccagagcatcgcagacctgatggtgggcgcaaaggaccaggcggtgttcaaatgtgaggtctcagatgagaatgttcggggtgtgtggctgaagaatgggaaggagctggtgcccgacagccgcataaaggtgtcccacatcgggcgggtccacaaactgaccattgacgacgtcacacctgccgacgaggctgactacagctttgtgcccgagggcttcgcctgcaacctgtcagccaagctccacttcatggaggtcaagattgacttcgtacccaggcaggaacctcccaagatccacctggactgcccaggccgcataccagacaccattgtggttgtagctggaaataagctacgtctggacgtccctatctctggggaccctgctcccactgtgatctggcagaaggctatcacgcaggggaataaggccccagccaggccagccccagatgccccagaggacacaggtgacagcgatgagtgggtgtttgacaagaagctgctgtgtgagaccgagggccgggtccgcgtggagaccaccaaggaccgcagcatcttcacggtcgagggggcagagaaggaagatgagggcgtctacacggtcacagtgaagaaccctgtgggcgaggaccaggtcaacctcacagtcaaggtcatcgacgtgccagacgcacctgcggcccccaagatcagcaacgtgggagaggactcctgcacagtacagtgggagccgcctgcctacgatggcgggcagcccatcctgggctacatcctggagcgcaagaagaagaagagctaccggtggatgcggctgaacttcgacctgattcaggagctgagtcatgaagcgcggcgcatgatcgagggcgtggtgtacgagatgcgcgtctacgcggtcaacgccatcggcatgtccaggcccagccctgcctcccagcccttcatgcctatcggtccccccagcgaacccacccacctggcagtagaggacgtctctgacaccacggtctccctcaagtggcggcccccagagcgcgtgggagcaggaggcctggatggctacagcgtggagtactgcccagagggctgctcagagtgggtggctgccctgcaggggctgacagagcacacatcgatactggtgaaggacctgcccacgggggcccggctgcttttccgagtgcgggcacacaatatggcagggcctggagcccctgttaccaccacggagccggtgacagtgcaggagatcctgcaacggccacggcttcagctgcccaggcacctgcgccagaccattcagaagaaggtcggggagcctgtgaaccttctcatccctttccagggcaagccccggcctcaggtgacctggaccaaagaggggcagcccctggcaggcgaggaggtgagcatccgcaacagccccacagacaccatcctgttcatccgggccgctcgccgcgtgcattcaggcacttaccaggtgacggtgcgcattgagaacatggaggacaaggccacgctggtgctgcaggttgttgacaagccaagtcctccccaggatctccgggtgactgacgcctggggtcttaatgtggctctggagtggaagccaccccaggatgtcggcaacacggagctctgggggtacacagtgcagaaagccgacaagaagaccatggagtggttcaccgtcttggagcattaccgccgcacccactgcgtggtgccagagctcatcattggcaatggctactacttccgcgtcttcagccagaatatggttggctttagtgacagagcggccaccaccaaggagcccgtctttatccccagaccaggcatcacctatgagccacccaactataaggccctggacttctccgaggccccaagcttcacccagcccctggtgaaccgctcggtcatcgcgggctacactgctatgctctgctgtgctgtccggggtagccccaagcccaagatttcctggttcaagaatggcctggacctgggagaagacgcccgcttccgcatgttcagcaagcagggagtgttgactctggagattagaaagccctgcccctttgacgggggcatctatgtctgcagggccaccaacttacagggcgaggcacggtgtgagtgccgcctggaggtgcgagtgcctcagtgacctcgagccaataaaggatcgtttattttcattggaagcgtgtgttggttttttgatcaggcgcgtccaagcttgcggccgcaggaacccctagtgatggagttggccactccctctctgcgcgctcgctcgctcactgaggccgcccgggcaaagcccgggcgtcgggcgacctttggtcgcccggcctcagtgagcgagcgagcgcgcagagagggagtggccaa

SEQ ID NO: 162 - DNA, 4781 bp, synthetic construct
  source 1..4781: mol_type = other DNA
ctgcgcgctcgctcgctcactgaggccgggcgaccaaaggtcgcccgacgcccgggctttgcccgggcggcctcagtgagcgagcgagcgcgcagagagggagtggccaactccatcactaggggttcctgcggccgcccttccaagattctggtgctgagacttatggagtgtcttggaggttgccttctgccccccaaccctgctcccagctggccctcccaggcctgggttgctggcctctgctttatcaggattctcaagagggacagctggtttatgttgcatgactgttccctgcatatctgctctggttttaaatagcttatctgagcagctggaggaccacatgggcttatatggcgtggggtacatgttcctgtagccttgtccctggcacctgccaaaatagcagccaacaccccccacccccaccgccatccccctgccccacccgtcccctgtcgcacattcctccctccgcagggctggctcaccaggccccagcccacatgcctgcttaaagccctctccatcctctgcctcacccagtccccgctgagactgagcagacgcctccaggatctgtcggcagctgctgttctgagccaccatgcctgagccggggaagaagccagtctcagcttttagcaagaagccacggtcagtggaagtggccgcaggcagccctgccgtgttcgaggccgagacagagcgggcaggagtgaaggtgcgctggcagcgcggaggcagtgacatcagcgccagcaacaagtacggcctggccacagagggcacacggcatacgctgacagtgcgggaagtgggccctgccgaccagggatcttacgcagtcattgctggctcctccaaggtcaagttcgacctcaaggtcatagaggcaggtaagtactagcagctacaatccagctaccattctgcttttattttatggttgggataaggctggattattctgagtccaagctaggcccttttgctaatcatgttcatacctcttatcttcctcccacagagaaggcagagcccatgctggcccctgcccctgcccctgctgaggccactggagcccctggagaagccccggccccagccgctgagctgggagaaagtgccccaagtcccaaagggtcaagctcagcagctctcaatggtcctacccctggagcccccgatgaccccattggcctcttcgtgatgcggccacaggatggcgaggtgaccgtgggtggcagcatcaccttctcagcccgcgtggccggcgccagcctcctgaagccgcctgtggtcaagtggttcaagggcaaatgggtggacctgagcagcaaggtgggccagcacctgcagctgcacgacagctacgaccgcgccagcaaggtctatctgttcgagctgcacatcaccgatgcccagcctgccttcactggcagctaccgctgtgaggtgtccaccaaggacaaatttgactgctccaacttcaatctcactgtccacgaggccatgggcaccggagacctggacctcctatcagccttccgccgcacgagcctggctggaggtggtcggcggatcagtgatagccatgaggacactgggattctggacttcagctcactgctgaaaaagagagacagtttccggaccccgagggactcgaagctggaggcaccagcagaggaggacgtgtgggagatcctacggcaggcacccccatctgagtacgagcgcatcgccttccagtacggcgtcactgacctgcgcggcatgctaaagaggctcaagggcatgaggcgcgatgagaagaagagcacagcctttcagaagaagctggagccggcctaccaggtgagcaaaggccacaagatccggctgaccgtggaactggctgaccatgacgctgaggtcaaatggctcaagaatggccaggagatccagatgagcggcagcaagtacatctttgagtccatcggtgccaagcgtaccctgaccatcagccagtgctcattggcggacgacgcagcctaccagtgcgtggtgggtggcgagaagtgtagcacggagctctttgtgaaagagccccctgtgctcatcacgcgccccttggaggaccagctggtgatggtggggcagcgggtggagtttgagtgtgaagtatcggaggagggggcgcaagtcaaatggctgaaggacggggtggagctgacccgggaggagaccttcaaataccggttcaagaaggacgggcagagacaccacctgatcatcaacgaggccatgctggaggacgcggggcactatgcactgtgcactagcgggggccaggcgctggctgagctcattgtgcaggaaaagaagctggaggtgtaccagagcatcgcagacctgatggtgggcgcaaaggaccaggcggtgttcaaatgtgaggtctcagatgagaatgttcggggtgtgtggctgaagaatgggaaggagctggtgcccgacagccgcataaaggtgtcccacatcgggcgggtccacaaactgaccattgacgacgtcacacctgccgacgaggctgactacagctttgtgcccgagggcttcgcctgcaacctgtcagccaagctccacttcatggaggtcaagattgacttcgtacccaggcaggaacctcccaagatccacctggactgcccaggccgcataccagacaccattgtggttgtagctggaaataagctacgtctggacgtccctatctctggggaccctgctcccactgtgatctggcagaaggctatcacgcaggggaataaggccccagccaggccagccccagatgccccagaggacacaggtgacagcgatgagtgggtgtttgacaagaagctgctgtgtgagaccgagggccgggtccgcgtggagaccaccaaggaccgcagcatcttcacggtcgagggggcagagaaggaagatgagggcgtctacacggtcacagtgaagaaccctgtgggcgaggaccaggtcaacctcacagtcaaggtcatcgacgtgccagacgcacctgcggcccccaagatcagcaacgtgggagaggactcctgcacagtacagtgggagccgcctgcctacgatggcgggcagcccatcctgggctacatcctggagcgcaagaagaagaagagctaccggtggatgcggctgaacttcgacctgattcaggagctgagtcatgaagcgcggcgcatgatcgagggcgtggtgtacgagatgcgcgtctacgcggtcaacgccatcggcatgtccaggcccagccctgcctcccagcccttcatgcctatcggtccccccagcgaacccacccacctggcagtagaggacgtctctgacaccacggtctccctcaagtggcggcccccagagcgcgtgggagcaggaggcctggatggctacagcgtggagtactgcccagagggctgctcagagtgggtggctgccctgcaggggctgacagagcacacatcgatactggtgaaggacctgcccacgggggcccggctgcttttccgagtgcgggcacacaatatggcagggcctggagcccctgttaccaccacggagccggtgacagtgcaggagatcctgcaacggccacggcttcagctgcccaggcacctgcgccagaccattcagaagaaggtcggggagcctgtgaaccttctcatccctttccagggcaagccccggcctcaggtgacctggaccaaagaggggcagcccctggcaggcgaggaggtgagcatccgcaacagccccacagacaccatcctgttcatccgggccgctcgccgcgtgcattcaggcacttaccaggtgacggtgcgcattgagaacatggaggacaaggccacgctggtgctgcaggttgttgacaagccaagtcctccccaggatctccgggtgactgacgcctggggtcttaatgtggctctggagtggaagccaccccaggatgtcggcaacacggagctctgggggtacacagtgcagaaagccgacaagaagaccatggagtggttcaccgtcttggagcattaccgccgcacccactgcgtggtgccagagctcatcattggcaatggctactacttccgcgtcttcagccagaatatggttggctttagtgacagagcggccaccaccaaggagcccgtctttatccccagaccaggcatcacctatgagccacccaactataaggccctggacttctccgaggccccaagcttcacccagcccctggtgaaccgctcggtcatcgcgggctacactgctatgctctgctgtgctgtccggggtagccccaagcccaagatttcctggttcaagaatggcctggacctgggagaagacgcccgcttccgcatgttcagcaagcagggagtgttgactctggagattagaaagccctgcccctttgacgggggcatctatgtctgcagggccaccaacttacagggcgaggcacggtgtgagtgccgcctggaggtgcgagtgcctcagtgacctcgagccaataaaggatcgtttattttcattggaagcgtgtgttggttttttgatcaggcgcgtccaagcttgcggccgcaggaacccctagtgatggagttggccactccctctctgcgcgctcgctcgctcactgaggccgggcgaccaaaggtcgcccgacgcccgggctttgcccgggcggcctcagtgagcgagcgagcgcgcag

SEQ ID NO: 163 - DNA, 4811 bp, synthetic construct
  source 1..4811: mol_type = other DNA
ttggccactccctctctgcgcgctcgctcgctcactgaggccgggcgaccaaaggtcgcccgacgcccgggctttgcccgggcggcctcagtgagcgagcgagcgcgcagagagggagtggccaactccatcactaggggttcctgcggccgcccttccaagattctggtgctgagacttatggagtgtcttggaggttgccttctgccccccaaccctgctcccagctggccctcccaggcctgggttgctggcctctgctttatcaggattctcaagagggacagctggtttatgttgcatgactgttccctgcatatctgctctggttttaaatagcttatctgagcagctggaggaccacatgggcttatatggcgtggggtacatgttcctgtagccttgtccctggcacctgccaaaatagcagccaacaccccccacccccaccgccatccccctgccccacccgtcccctgtcgcacattcctccctccgcagggctggctcaccaggccccagcccacatgcctgcttaaagccctctccatcctctgcctcacccagtccccgctgagactgagcagacgcctccaggatctgtcggcagctgctgttctgagccaccatgcctgagccggggaagaagccagtctcagcttttagcaagaagccacggtcagtggaagtggccgcaggcagccctgccgtgttcgaggccgagacagagcgggcaggagtgaaggtgcgctggcagcgcggaggcagtgacatcagcgccagcaacaagtacggcctggccacagagggcacacggcatacgctgacagtgcgggaagtgggccctgccgaccagggatcttacgcagtcattgctggctcctccaaggtcaagttcgacctcaaggtcatagaggcaggtaagtactagcagctacaatccagctaccattctgcttttattttatggttgggataaggctggattattctgagtccaagctaggcccttttgctaatcatgttcatacctcttatcttcctcccacagagaaggcagagcccatgctggcccctgcccctgcccctgctgaggccactggagcccctggagaagccccggccccagccgctgagctgggagaaagtgccccaagtcccaaagggtcaagctcagcagctctcaatggtcctacccctggagcccccgatgaccccattggcctcttcgtgatgcggccacaggatggcgaggtgaccgtgggtggcagcatcaccttctcagcccgcgtggccggcgccagcctcctgaagccgcctgtggtcaagtggttcaagggcaaatgggtggacctgagcagcaaggtgggccagcacctgcagctgcacgacagctacgaccgcgccagcaaggtctatctgttcgagctgcacatcaccgatgcccagcctgccttcactggcagctaccgctgtgaggtgtccaccaaggacaaatttgactgctccaacttcaatctcactgtccacgaggccatgggcaccggagacctggacctcctatcagccttccgccgcacgagcctggctggaggtggtcggcggatcagtgatagccatgaggacactgggattctggacttcagctcactgctgaaaaagagagacagtttccggaccccgagggactcgaagctggaggcaccagcagaggaggacgtgtgggagatcctacggcaggcacccccatctgagtacgagcgcatcgccttccagtacggcgtcactgacctgcgcggcatgctaaagaggctcaagggcatgaggcgcgatgagaagaagagcacagcctttcagaagaagctggagccggcctaccaggtgagcaaaggccacaagatccggctgaccgtggaactggctgaccatgacgctgaggtcaaatggctcaagaatggccaggagatccagatgagcggcagcaagtacatctttgagtccatcggtgccaagcgtaccctgaccatcagccagtgctcattggcggacgacgcagcctaccagtgcgtggtgggtggcgagaagtgtagcacggagctctttgtgaaagagccccctgtgctcatcacgcgccccttggaggaccagctggtgatggtggggcagcgggtggagtttgagtgtgaagtatcggaggagggggcgcaagtcaaatggctgaaggacggggtggagctgacccgggaggagaccttcaaataccggttcaagaaggacgggcagagacaccacctgatcatcaacgaggccatgctggaggacgcggggcactatgcactgtgcactagcgggggccaggcgctggctgagctcattgtgcaggaaaagaagctggaggtgtaccagagcatcgcagacctgatggtgggcgcaaaggaccaggcggtgttcaaatgtgaggtctcagatgagaatgttcggggtgtgtggctgaagaatgggaaggagctggtgcccgacagccgcataaaggtgtcccacatcgggcgggtccacaaactgaccattgacgacgtcacacctgccgacgaggctgactacagctttgtgcccgagggcttcgcctgcaacctgtcagccaagctccacttcatggaggtcaagattgacttcgtacccaggcaggaacctcccaagatccacctggactgcccaggccgcataccagacaccattgtggttgtagctggaaataagctacgtctggacgtccctatctctggggaccctgctcccactgtgatctggcagaaggctatcacgcaggggaataaggccccagccaggccagccccagatgccccagaggacacaggtgacagcgatgagtgggtgtttgacaagaagctgctgtgtgagaccgagggccgggtccgcgtggagaccaccaaggaccgcagcatcttcacggtcgagggggcagagaaggaagatgagggcgtctacacggtcacagtgaagaaccctgtgggcgaggaccaggtcaacctcacagtcaaggtcatcgacgtgccagacgcacctgcggcccccaagatcagcaacgtgggagaggactcctgcacagtacagtgggagccgcctgcctacgatggcgggcagcccatcctgggctacatcctggagcgcaagaagaagaagagctaccggtggatgcggctgaacttcgacctgattcaggagctgagtcatgaagcgcggcgcatgatcgagggcgtggtgtacgagatgcgcgtctacgcggtcaacgccatcggcatgtccaggcccagccctgcctcccagcccttcatgcctatcggtccccccagcgaacccacccacctggcagtagaggacgtctctgacaccacggtctccctcaagtggcggcccccagagcgcgtgggagcaggaggcctggatggctacagcgtggagtactgcccagagggctgctcagagtgggtggctgccctgcaggggctgacagagcacacatcgatactggtgaaggacctgcccacgggggcccggctgcttttccgagtgcgggcacacaatatggcagggcctggagcccctgttaccaccacggagccggtgacagtgcaggagatcctgcaacggccacggcttcagctgcccaggcacctgcgccagaccattcagaagaaggtcggggagcctgtgaaccttctcatccctttccagggcaagccccggcctcaggtgacctggaccaaagaggggcagcccctggcaggcgaggaggtgagcatccgcaacagccccacagacaccatcctgttcatccgggccgctcgccgcgtgcattcaggcacttaccaggtgacggtgcgcattgagaacatggaggacaaggccacgctggtgctgcaggttgttgacaagccaagtcctccccaggatctccgggtgactgacgcctggggtcttaatgtggctctggagtggaagccaccccaggatgtcggcaacacggagctctgggggtacacagtgcagaaagccgacaagaagaccatggagtggttcaccgtcttggagcattaccgccgcacccactgcgtggtgccagagctcatcattggcaatggctactacttccgcgtcttcagccagaatatggttggctttagtgacagagcggccaccaccaaggagcccgtctttatccccagaccaggcatcacctatgagccacccaactataaggccctggacttctccgaggccccaagcttcacccagcccctggtgaaccgctcggtcatcgcgggctacactgctatgctctgctgtgctgtccggggtagccccaagcccaagatttcctggttcaagaatggcctggacctgggagaagacgcccgcttccgcatgttcagcaagcagggagtgttgactctggagattagaaagccctgcccctttgacgggggcatctatgtctgcagggccaccaacttacagggcgaggcacggtgtgagtgccgcctggaggtgcgagtgcctcagtgacctcgagccaataaaggatcgtttattttcattggaagcgtgtgttggttttttgatcaggcgcgtccaagcttgcggccgcaggaacccctagtgatggagttggccactccctctctgcgcgctcgctcgctcactgaggccgggcgaccaaaggtcgcccgacgcccgggctttgcccgggcggcctcagtgagcgagcgagcgcgcagagagggagtggccaa

SEQ ID NO: 164 - DNA, 4844 bp, synthetic construct
  source 1..4844: mol_type = other DNA
ctgcgcgctcgctcgctcactgaggccgggcgaccaaaggtcgcccgacgcccgggctttgcccgggcggcctcagtgagcgagcgagcgcgcagagagggagtggccaactccatcactaggggttcctgcggccgcctggaagatgtctttacccccagcatcagttcaagtggagcagcacataactcttgccctctgccttccaagattctggtgctgagacttatggagtgtcttggaggttgccttctgccccccaaccctgctcccagctggccctcccaggcctgggttgctggcctctgctttatcaggattctcaagagggacagctggtttatgttgcatgactgttccctgcatatctgctctggttttaaatagcttatctgagcagctggaggaccacatgggcttatatggcgtggggtacatgttcctgtagccttgtccctggcacctgccaaaatagcagccaacaccccccacccccaccgccatccccctgccccacccgtcccctgtcgcacattcctccctccgcagggctggctcaccaggccccagcccacatgcctgcttaaagccctctccatcctctgcctcacccagtccccgctgagactgagcagacgcctccaggatctgtcggcagctgctgttctgagccaccatgcctgagccggggaagaagccagtctcagcttttagcaagaagccacggtcagtggaagtggccgcaggcagccctgccgtgttcgaggccgagacagagcgggcaggagtgaaggtgcgctggcagcgcggaggcagtgacatcagcgccagcaacaagtacggcctggccacagagggcacacggcatacgctgacagtgcgggaagtgggccctgccgaccagggatcttacgcagtcattgctggctcctccaaggtcaagttcgacctcaaggtcatagaggcaggtaagtactagcagctacaatccagctaccattctgcttttattttatggttgggataaggctggattattctgagtccaagctaggcccttttgctaatcatgttcatacctcttatcttcctcccacagagaaggcagagcccatgctggcccctgcccctgcccctgctgaggccactggagcccctggagaagccccggccccagccgctgagctgggagaaagtgccccaagtcccaaagggtcaagctcagcagctctcaatggtcctacccctggagcccccgatgaccccattggcctcttcgtgatgcggccacaggatggcgaggtgaccgtgggtggcagcatcaccttctcagcccgcgtggccggcgccagcctcctgaagccgcctgtggtcaagtggttcaagggcaaatgggtggacctgagcagcaaggtgggccagcacctgcagctgcacgacagctacgaccgcgccagcaaggtctatctgttcgagctgcacatcaccgatgcccagcctgccttcactggcagctaccgctgtgaggtgtccaccaaggacaaatttgactgctccaacttcaatctcactgtccacgaggccatgggcaccggagacctggacctcctatcagccttccgccgcacgagcctggctggaggtggtcggcggatcagtgatagccatgaggacactgggattctggacttcagctcactgctgaaaaagagagacagtttccggaccccgagggactcgaagctggaggcaccagcagaggaggacgtgtgggagatcctacggcaggcacccccatctgagtacgagcgcatcgccttccagtacggcgtcactgacctgcgcggcatgctaaagaggctcaagggcatgaggcgcgatgagaagaagagcacagcctttcagaagaagctggagccggcctaccaggtgagcaaaggccacaagatccggctgaccgtggaactggctgaccatgacgctgaggtcaaatggctcaagaatggccaggagatccagatgagcggcagcaagtacatctttgagtccatcggtgccaagcgtaccctgaccatcagccagtgctcattggcggacgacgcagcctaccagtgcgtggtgggtggcgagaagtgtagcacggagctctttgtgaaagagccccctgtgctcatcacgcgccccttggaggaccagctggtgatggtggggcagcgggtggagtttgagtgtgaagtatcggaggagggggcgcaagtcaaatggctgaaggacggggtggagctgacccgggaggagaccttcaaataccggttcaagaaggacgggcagagacaccacctgatcatcaacgaggccatgctggaggacgcggggcactatgcactgtgcactagcgggggccaggcgctggctgagctcattgtgcaggaaaagaagctggaggtgtaccagagcatcgcagacctgatggtgggcgcaaaggaccaggcggtgttcaaatgtgaggtctcagatgagaatgttcggggtgtgtggctgaagaatgggaaggagctggtgcccgacagccgcataaaggtgtcccacatcgggcgggtccacaaactgaccattgacgacgtcacacctgccgacgaggctgactacagctttgtgcccgagggcttcgcctgcaacctgtcagccaagctccacttcatggaggtcaagattgacttcgtacccaggcaggaacctcccaagatccacctggactgcccaggccgcataccagacaccattgtggttgtagctggaaataagctacgtctggacgtccctatctctggggaccctgctcccactgtgatctggcagaaggctatcacgcaggggaataaggccccagccaggccagccccagatgccccagaggacacaggtgacagcgatgagtgggtgtttgacaagaagctgctgtgtgagaccgagggccgggtccgcgtggagaccaccaaggaccgcagcatcttcacggtcgagggggcagagaaggaagatgagggcgtctacacggtcacagtgaagaaccctgtgggcgaggaccaggtcaacctcacagtcaaggtcatcgacgtgccagacgcacctgcggcccccaagatcagcaacgtgggagaggactcctgcacagtacagtgggagccgcctgcctacgatggcgggcagcccatcctgggctacatcctggagcgcaagaagaagaagagctaccggtggatgcggctgaacttcgacctgattcaggagctgagtcatgaagcgcggcgcatgatcgagggcgtggtgtacgagatgcgcgtctacgcggtcaacgccatcggcatgtccaggcccagccctgcctcccagcccttcatgcctatcggtccccccagcgaacccacccacctggcagtagaggacgtctctgacaccacggtctccctcaagtggcggcccccagagcgcgtgggagcaggaggcctggatggctacagcgtggagtactgcccagagggctgctcagagtgggtggctgccctgcaggggctgacagagcacacatcgatactggtgaaggacctgcccacgggggcccggctgcttttccgagtgcgggcacacaatatggcagggcctggagcccctgttaccaccacggagccggtgacagtgcaggagatcctgcaacggccacggcttcagctgcccaggcacctgcgccagaccattcagaagaaggtcggggagcctgtgaaccttctcatccctttccagggcaagccccggcctcaggtgacctggaccaaagaggggcagcccctggcaggcgaggaggtgagcatccgcaacagccccacagacaccatcctgttcatccgggccgctcgccgcgtgcattcaggcacttaccaggtgacggtgcgcattgagaacatggaggacaaggccacgctggtgctgcaggttgttgacaagccaagtcctccccaggatctccgggtgactgacgcctggggtcttaatgtggctctggagtggaagccaccccaggatgtcggcaacacggagctctgggggtacacagtgcagaaagccgacaagaagaccatggagtggttcaccgtcttggagcattaccgccgcacccactgcgtggtgccagagctcatcattggcaatggctactacttccgcgtcttcagccagaatatggttggctttagtgacagagcggccaccaccaaggagcccgtctttatccccagaccaggcatcacctatgagccacccaactataaggccctggacttctccgaggccccaagcttcacccagcccctggtgaaccgctcggtcatcgcgggctacactgctatgctctgctgtgctgtccggggtagccccaagcccaagatttcctggttcaagaatggcctggacctgggagaagacgcccgcttccgcatgttcagcaagcagggagtgttgactctggagattagaaagccctgcccctttgacgggggcatctatgtctgcagggccaccaacttacagggcgaggcacggtgtgagtgccgcctggaggtgcgagtgcctcagtgacctcgagccaataaaggatcgtttattttcattggaagcgtgtgttggttttttgatcaggcgcgtccaagcttgcggccgcaggaacccctagtgatggagttggccactccctctctgcgcgctcgctcgctcactgaggccgcccgggcaaagcccgggcgtcgggcgacctttggtcgcccggcctcagtgagcgagcgagcgcgcag

SEQ ID NO: 165 - DNA, 4874 bp, synthetic construct
  source 1..4874: mol_type = other DNA
ttggccactccctctctgcgcgctcgctcgctcactgaggccgggcgaccaaaggtcgcccgacgcccgggctttgcccgggcggcctcagtgagcgagcgagcgcgcagagagggagtggccaactccatcactaggggttcctgcggccgcctggaagatgtctttacccccagcatcagttcaagtggagcagcacataactcttgccctctgccttccaagattctggtgctgagacttatggagtgtcttggaggttgccttctgccccccaaccctgctcccagctggccctcccaggcctgggttgctggcctctgctttatcaggattctcaagagggacagctggtttatgttgcatgactgttccctgcatatctgctctggttttaaatagcttatctgagcagctggaggaccacatgggcttatatggcgtggggtacatgttcctgtagccttgtccctggcacctgccaaaatagcagccaacaccccccacccccaccgccatccccctgccccacccgtcccctgtcgcacattcctccctccgcagggctggctcaccaggccccagcccacatgcctgcttaaagccctctccatcctctgcctcacccagtccccgctgagactgagcagacgcctccaggatctgtcggcagctgctgttctgagccaccatgcctgagccggggaagaagccagtctcagcttttagcaagaagccacggtcagtggaagtggccgcaggcagccctgccgtgttcgaggccgagacagagcgggcaggagtgaaggtgcgctggcagcgcggaggcagtgacatcagcgccagcaacaagtacggcctggccacagagggcacacggcatacgctgacagtgcgggaagtgggccctgccgaccagggatcttacgcagtcattgctggctcctccaaggtcaagttcgacctcaaggtcatagaggcaggtaagtactagcagctacaatccagctaccattctgcttttattttatggttgggataaggctggattattctgagtccaagctaggcccttttgctaatcatgttcatacctcttatcttcctcccacagagaaggcagagcccatgctggcccctgcccctgcccctgctgaggccactggagcccctggagaagccccggccccagccgctgagctgggagaaagtgccccaagtcccaaagggtcaagctcagcagctctcaatggtcctacccctggagcccccgatgaccccattggcctcttcgtgatgcggccacaggatggcgaggtgaccgtgggtggcagcatcaccttctcagcccgcgtggccggcgccagcctcctgaagccgcctgtggtcaagtggttcaagggcaaatgggtggacctgagcagcaaggtgggccagcacctgcagctgcacgacagctacgaccgcgccagcaaggtctatctgttcgagctgcacatcaccgatgcccagcctgccttcactggcagctaccgctgtgaggtgtccaccaaggacaaatttgactgctccaacttcaatctcactgtccacgaggccatgggcaccggagacctggacctcctatcagccttccgccgcacgagcctggctggaggtggtcggcggatcagtgatagccatgaggacactgggattctggacttcagctcactgctgaaaaagagagacagtttccggaccccgagggactcgaagctggaggcaccagcagaggaggacgtgtgggagatcctacggcaggcacccccatctgagtacgagcgcatcgccttccagtacggcgtcactgacctgcgcggcatgctaaagaggctcaagggcatgaggcgcgatgagaagaagagcacagcctttcagaagaagctggagccggcctaccaggtgagcaaaggccacaagatccggctgaccgtggaactggctgaccatgacgctgaggtcaaatggctcaagaatggccaggagatccagatgagcggcagcaagtacatctttgagtccatcggtgccaagcgtaccctgaccatcagccagtgctcattggcggacgacgcagcctaccagtgcgtggtgggtggcgagaagtgtagcacggagctctttgtgaaagagccccctgtgctcatcacgcgccccttggaggaccagctggtgatggtggggcagcgggtggagtttgagtgtgaagtatcggaggagggggcgcaagtcaaatggctgaaggacggggtggagctgacccgggaggagaccttcaaataccggttcaagaaggacgggcagagacaccacctgatcatcaacgaggccatgctggaggacgcggggcactatgcactgtgcactagcgggggccaggcgctggctgagctcattgtgcaggaaaagaagctggaggtgtaccagagcatcgcagacctgatggtgggcgcaaaggaccaggcggtgttcaaatgtgaggtctcagatgagaatgttcggggtgtgtggctgaagaatgggaaggagctggtgcccgacagccgcataaaggtgtcccacatcgggcgggtccacaaactgaccattgacgacgtcacacctgccgacgaggctgactacagctttgtgcccgagggcttcgcctgcaacctgtcagccaagctccacttcatggaggtcaagattgacttcgtacccaggcaggaacctcccaagatccacctggactgcccaggccgcataccagacaccattgtggttgtagctggaaataagctacgtctggacgtccctatctctggggaccctgctcccactgtgatctggcagaaggctatcacgcaggggaataaggccccagccaggccagccccagatgccccagaggacacaggtgacagcgatgagtgggtgtttgacaagaagctgctgtgtgagaccgagggccgggtccgcgtggagaccaccaaggaccgcagcatcttcacggtcgagggggcagagaaggaagatgagggcgtctacacggtcacagtgaagaaccctgtgggcgaggaccaggtcaacctcacagtcaaggtcatcgacgtgccagacgcacctgcggcccccaagatcagcaacgtgggagaggactcctgcacagtacagtgggagccgcctgcctacgatggcgggcagcccatcctgggctacatcctggagcgcaagaagaagaagagctaccggtggatgcggctgaacttcgacctgattcaggagctgagtcatgaagcgcggcgcatgatcgagggcgtggtgtacgagatgcgcgtctacgcggtcaacgccatcggcatgtccaggcccagccctgcctcccagcccttcatgcctatcggtccccccagcgaacccacccacctggcagtagaggacgtctctgacaccacggtctccctcaagtggcggcccccagagcgcgtgggagcaggaggcctggatggctacagcgtggagtactgcccagagggctgctcagagtgggtggctgccctgcaggggctgacagagcacacatcgatactggtgaaggacctgcccacgggggcccggctgcttttccgagtgcgggcacacaatatggcagggcctggagcccctgttaccaccacggagccggtgacagtgcaggagatcctgcaacggccacggcttcagctgcccaggcacctgcgccagaccattcagaagaaggtcggggagcctgtgaaccttctcatccctttccagggcaagccccggcctcaggtgacctggaccaaagaggggcagcccctggcaggcgaggaggtgagcatccgcaacagccccacagacaccatcctgttcatccgggccgctcgccgcgtgcattcaggcacttaccaggtgacggtgcgcattgagaacatggaggacaaggccacgctggtgctgcaggttgttgacaagccaagtcctccccaggatctccgggtgactgacgcctggggtcttaatgtggctctggagtggaagccaccccaggatgtcggcaacacggagctctgggggtacacagtgcagaaagccgacaagaagaccatggagtggttcaccgtcttggagcattaccgccgcacccactgcgtggtgccagagctcatcattggcaatggctactacttccgcgtcttcagccagaatatggttggctttagtgacagagcggccaccaccaaggagcccgtctttatccccagaccaggcatcacctatgagccacccaactataaggccctggacttctccgaggccccaagcttcacccagcccctggtgaaccgctcggtcatcgcgggctacactgctatgctctgctgtgctgtccggggtagccccaagcccaagatttcctggttcaagaatggcctggacctgggagaagacgcccgcttccgcatgttcagcaagcagggagtgttgactctggagattagaaagccctgcccctttgacgggggcatctatgtctgcagggccaccaacttacagggcgaggcacggtgtgagtgccgcctggaggtgcgagtgcctcagtgacctcgagccaataaaggatcgtttattttcattggaagcgtgtgttggttttttgatcaggcgcgtccaagcttgcggccgcaggaacccctagtgatggagttggccactccctctctgcgcgctcgctcgctcactgaggccgcccgggcaaagcccgggcgtcgggcgacctttggtcgcccggcctcagtgagcgagcgagcgcgcagagagggagtggccaa

SEQ ID NO: 166 - DNA, 4844 bp, synthetic construct
  source 1..4844: mol_type = other DNA
ctgcgcgctcgctcgctcactgaggccgcccgggcaaagcccgggcgtcgggcgacctttggtcgcccggcctcagtgagcgagcgagcgcgcagagagggagtggccaactccatcactaggggttcctgcggccgcctggaagatgtctttacccccagcatcagttcaagtggagcagcacataactcttgccctctgccttccaagattctggtgctgagacttatggagtgtcttggaggttgccttctgccccccaaccctgctcccagctggccctcccaggcctgggttgctggcctctgctttatcaggattctcaagagggacagctggtttatgttgcatgactgttccctgcatatctgctctggttttaaatagcttatctgagcagctggaggaccacatgggcttatatggcgtggggtacatgttcctgtagccttgtccctggcacctgccaaaatagcagccaacaccccccacccccaccgccatccccctgccccacccgtcccctgtcgcacattcctccctccgcagggctggctcaccaggccccagcccacatgcctgcttaaagccctctccatcctctgcctcacccagtccccgctgagactgagcagacgcctccaggatctgtcggcagctgctgttctgagccaccatgcctgagccggggaagaagccagtctcagcttttagcaagaagccacggtcagtggaagtggccgcaggcagccctgccgtgttcgaggccgagacagagcgggcaggagtgaaggtgcgctggcagcgcggaggcagtgacatcagcgccagcaacaagtacggcctggccacagagggcacacggcatacgctgacagtgcgggaagtgggccctgccgaccagggatcttacgcagtcattgctggctcctccaaggtcaagttcgacctcaaggtcatagaggcaggtaagtactagcagctacaatccagctaccattctgcttttattttatggttgggataaggctggattattctgagtccaagctaggcccttttgctaatcatgttcatacctcttatcttcctcccacagagaaggcagagcccatgctggcccctgcccctgcccctgctgaggccactggagcccctggagaagccccggccccagccgctgagctgggagaaagtgccccaagtcccaaagggtcaagctcagcagctctcaatggtcctacccctggagcccccgatgaccccattggcctcttcgtgatgcggccacaggatggcgaggtgaccgtgggtggcagcatcaccttctcagcccgcgtggccggcgccagcctcctgaagccgcctgtggtcaagtggttcaagggcaaatgggtggacctgagcagcaaggtgggccagcacctgcagctgcacgacagctacgaccgcgccagcaaggtctatctgttcgagctgcacatcaccgatgcccagcctgccttcactggcagctaccgctgtgaggtgtccaccaaggacaaatttgactgctccaacttcaatctcactgtccacgaggccatgggcaccggagacctggacctcctatcagccttccgccgcacgagcctggctggaggtggtcggcggatcagtgatagccatgaggacactgggattctggacttcagctcactgctgaaaaagagagacagtttccggaccccgagggactcgaagctggaggcaccagcagaggaggacgtgtgggagatcctacggcaggcacccccatctgagtacgagcgcatcgccttccagtacggcgtcactgacctgcgcggcatgctaaagaggctcaagggcatgaggcgcgatgagaagaagagcacagcctttcagaagaagctggagccggcctaccaggtgagcaaaggccacaagatccggctgaccgtggaactggctgaccatgacgctgaggtcaaatggctcaagaatggccaggagatccagatgagcggcagcaagtacatctttgagtccatcggtgccaagcgtaccctgaccatcagccagtgctcattggcggacgacgcagcctaccagtgcgtggtgggtggcgagaagtgtagcacggagctctttgtgaaagagccccctgtgctcatcacgcgccccttggaggaccagctggtgatggtggggcagcgggtggagtttgagtgtgaagtatcggaggagggggcgcaagtcaaatggctgaaggacggggtggagctgacccgggaggagaccttcaaataccggttcaagaaggacgggcagagacaccacctgatcatcaacgaggccatgctggaggacgcggggcactatgcactgtgcactagcgggggccaggcgctggctgagctcattgtgcaggaaaagaagctggaggtgtaccagagcatcgcagacctgatggtgggcgcaaaggaccaggcggtgttcaaatgtgaggtctcagatgagaatgttcggggtgtgtggctgaagaatgggaaggagctggtgcccgacagccgcataaaggtgtcccacatcgggcgggtccacaaactgaccattgacgacgtcacacctgccgacgaggctgactacagctttgtgcccgagggcttcgcctgcaacctgtcagccaagctccacttcatggaggtcaagattgacttcgtacccaggcaggaacctcccaagatccacctggactgcccaggccgcataccagacaccattgtggttgtagctggaaataagctacgtctggacgtccctatctctggggaccctgctcccactgtgatctggcagaaggctatcacgcaggggaataaggccccagccaggccagccccagatgccccagaggacacaggtgacagcgatgagtgggtgtttgacaagaagctgctgtgtgagaccgagggccgggtccgcgtggagaccaccaaggaccgcagcatcttcacggtcgagggggcagagaaggaagatgagggcgtctacacggtcacagtgaagaaccctgtgggcgaggaccaggtcaacctcacagtcaaggtcatcgacgtgccagacgcacctgcggcccccaagatcagcaacgtgggagaggactcctgcacagtacagtgggagccgcctgcctacgatggcgggcagcccatcctgggctacatcctggagcgcaagaagaagaagagctaccggtggatgcggctgaacttcgacctgattcaggagctgagtcatgaagcgcggcgcatgatcgagggcgtggtgtacgagatgcgcgtctacgcggtcaacgccatcggcatgtccaggcccagccctgcctcccagcccttcatgcctatcggtccccccagcgaacccacccacctggcagtagaggacgtctctgacaccacggtctccctcaagtggcggcccccagagcgcgtgggagcaggaggcctggatggctacagcgtggagtactgcccagagggctgctcagagtgggtggctgccctgcaggggctgacagagcacacatcgatactggtgaaggacctgcccacgggggcccggctgcttttccgagtgcgggcacacaatatggcagggcctggagcccctgttaccaccacggagccggtgacagtgcaggagatcctgcaacggccacggcttcagctgcccaggcacctgcgccagaccattcagaagaaggtcggggagcctgtgaaccttctcatccctttccagggcaagccccggcctcaggtgacctggaccaaagaggggcagcccctggcaggcgaggaggtgagcatccgcaacagccccacagacaccatcctgttcatccgggccgctcgccgcgtgcattcaggcacttaccaggtgacggtgcgcattgagaacatggaggacaaggccacgctggtgctgcaggttgttgacaagccaagtcctccccaggatctccgggtgactgacgcctggggtcttaatgtggctctggagtggaagccaccccaggatgtcggcaacacggagctctgggggtacacagtgcagaaagccgacaagaagaccatggagtggttcaccgtcttggagcattaccgccgcacccactgcgtggtgccagagctcatcattggcaatggctactacttccgcgtcttcagccagaatatggttggctttagtgacagagcggccaccaccaaggagcccgtctttatccccagaccaggcatcacctatgagccacccaactataaggccctggacttctccgaggccccaagcttcacccagcccctggtgaaccgctcggtcatcgcgggctacactgctatgctctgctgtgctgtccggggtagccccaagcccaagatttcctggttcaagaatggcctggacctgggagaagacgcccgcttccgcatgttcagcaagcagggagtgttgactctggagattagaaagccctgcccctttgacgggggcatctatgtctgcagggccaccaacttacagggcgaggcacggtgtgagtgccgcctggaggtgcgagtgcctcagtgacctcgagccaataaaggatcgtttattttcattggaagcgtgtgttggttttttgatcaggcgcgtccaagcttgcggccgcaggaacccctagtgatggagttggccactccctctctgcgcgctcgctcgctcactgaggccgcccgggcaaagcccgggcgtcgggcgacctttggtcgcccggcctcagtgagcgagcgagcgcgcag

SEQ ID NO: 167 - DNA, 4874 bp, synthetic construct
  source 1..4874: mol_type = other DNA
ttggccactccctctctgcgcgctcgctcgctcactgaggccgcccgggcaaagcccgggcgtcgggcgacctttggtcgcccggcctcagtgagcgagcgagcgcgcagagagggagtggccaactccatcactaggggttcctgcggccgcctggaagatgtctttacccccagcatcagttcaagtggagcagcacataactcttgccctctgccttccaagattctggtgctgagacttatggagtgtcttggaggttgccttctgccccccaaccctgctcccagctggccctcccaggcctgggttgctggcctctgctttatcaggattctcaagagggacagctggtttatgttgcatgactgttccctgcatatctgctctggttttaaatagcttatctgagcagctggaggaccacatgggcttatatggcgtggggtacatgttcctgtagccttgtccctggcacctgccaaaatagcagccaacaccccccacccccaccgccatccccctgccccacccgtcccctgtcgcacattcctccctccgcagggctggctcaccaggccccagcccacatgcctgcttaaagccctctccatcctctgcctcacccagtccccgctgagactgagcagacgcctccaggatctgtcggcagctgctgttctgagccaccatgcctgagccggggaagaagccagtctcagcttttagcaagaagccacggtcagtggaagtggccgcaggcagccctgccgtgttcgaggccgagacagagcgggcaggagtgaaggtgcgctggcagcgcggaggcagtgacatcagcgccagcaacaagtacggcctggccacagagggcacacggcatacgctgacagtgcgggaagtgggccctgccgaccagggatcttacgcagtcattgctggctcctccaaggtcaagttcgacctcaaggtcatagaggcaggtaagtactagcagctacaatccagctaccattctgcttttattttatggttgggataaggctggattattctgagtccaagctaggcccttttgctaatcatgttcatacctcttatcttcctcccacagagaaggcagagcccatgctggcccctgcccctgcccctgctgaggccactggagcccctggagaagccccggccccagccgctgagctgggagaaagtgccccaagtcccaaagggtcaagctcagcagctctcaatggtcctacccctggagcccccgatgaccccattggcctcttcgtgatgcggccacaggatggcgaggtgaccgtgggtggcagcatcaccttctcagcccgcgtggccggcgccagcctcctgaagccgcctgtggtcaagtggttcaagggcaaatgggtggacctgagcagcaaggtgggccagcacctgcagctgcacgacagctacgaccgcgccagcaaggtctatctgttcgagctgcacatcaccgatgcccagcctgccttcactggcagctaccgctgtgaggtgtccaccaaggacaaatttgactgctccaacttcaatctcactgtccacgaggccatgggcaccggagacctggacctcctatcagccttccgccgcacgagcctggctggaggtggtcggcggatcagtgatagccatgaggacactgggattctggacttcagctcactgctgaaaaagagagacagtttccggaccccgagggactcgaagctggaggcaccagcagaggaggacgtgtgggagatcctacggcaggcacccccatctgagtacgagcgcatcgccttccagtacggcgtcactgacctgcgcggcatgctaaagaggctcaagggcatgaggcgcgatgagaagaagagcacagcctttcagaagaagctggagccggcctaccaggtgagcaaaggccacaagatccggctgaccgtggaactggctgaccatgacgctgaggtcaaatggctcaagaatggccaggagatccagatgagcggcagcaagtacatctttgagtccatcggtgccaagcgtaccctgaccatcagccagtgctcattggcggacgacgcagcctaccagtgcgtggtgggtggcgagaagtgtagcacggagctctttgtgaaagagccccctgtgctcatcacgcgccccttggaggaccagctggtgatggtggggcagcgggtggagtttgagtgtgaagtatcggaggagggggcgcaagtcaaatggctgaaggacggggtggagctgacccgggaggagaccttcaaataccggttcaagaaggacgggcagagacaccacctgatcatcaacgaggccatgctggaggacgcggggcactatgcactgtgcactagcgggggccaggcgctggctgagctcattgtgcaggaaaagaagctggaggtgtaccagagcatcgcagacctgatggtgggcgcaaaggaccaggcggtgttcaaatgtgaggtctcagatgagaatgttcggggtgtgtggctgaagaatgggaaggagctggtgcccgacagccgcataaaggtgtcccacatcgggcgggtccacaaactgaccattgacgacgtcacacctgccgacgaggctgactacagctttgtgcccgagggcttcgcctgcaacctgtcagccaagctccacttcatggaggtcaagattgacttcgtacccaggcaggaacctcccaagatccacctggactgcccaggccgcataccagacaccattgtggttgtagctggaaataagctacgtctggacgtccctatctctggggaccctgctcccactgtgatctggcagaaggctatcacgcaggggaataaggccccagccaggccagccccagatgccccagaggacacaggtgacagcgatgagtgggtgtttgacaagaagctgctgtgtgagaccgagggccgggtccgcgtggagaccaccaaggaccgcagcatcttcacggtcgagggggcagagaaggaagatgagggcgtctacacggtcacagtgaagaaccctgtgggcgaggaccaggtcaacctcacagtcaaggtcatcgacgtgccagacgcacctgcggcccccaagatcagcaacgtgggagaggactcctgcacagtacagtgggagccgcctgcctacgatggcgggcagcccatcctgggctacatcctggagcgcaagaagaagaagagctaccggtggatgcggctgaacttcgacctgattcaggagctgagtcatgaagcgcggcgcatgatcgagggcgtggtgtacgagatgcgcgtctacgcggtcaacgccatcggcatgtccaggcccagccctgcctcccagcccttcatgcctatcggtccccccagcgaacccacccacctggcagtagaggacgtctctgacaccacggtctccctcaagtggcggcccccagagcgcgtgggagcaggaggcctggatggctacagcgtggagtactgcccagagggctgctcagagtgggtggctgccctgcaggggctgacagagcacacatcgatactggtgaaggacctgcccacgggggcccggctgcttttccgagtgcgggcacacaatatggcagggcctggagcccctgttaccaccacggagccggtgacagtgcaggagatcctgcaacggccacggcttcagctgcccaggcacctgcgccagaccattcagaagaaggtcggggagcctgtgaaccttctcatccctttccagggcaagccccggcctcaggtgacctggaccaaagaggggcagcccctggcaggcgaggaggtgagcatccgcaacagccccacagacaccatcctgttcatccgggccgctcgccgcgtgcattcaggcacttaccaggtgacggtgcgcattgagaacatggaggacaaggccacgctggtgctgcaggttgttgacaagccaagtcctccccaggatctccgggtgactgacgcctggggtcttaatgtggctctggagtggaagccaccccaggatgtcggcaacacggagctctgggggtacacagtgcagaaagccgacaagaagaccatggagtggttcaccgtcttggagcattaccgccgcacccactgcgtggtgccagagctcatcattggcaatggctactacttccgcgtcttcagccagaatatggttggctttagtgacagagcggccaccaccaaggagcccgtctttatccccagaccaggcatcacctatgagccacccaactataaggccctggacttctccgaggccccaagcttcacccagcccctggtgaaccgctcggtcatcgcgggctacactgctatgctctgctgtgctgtccggggtagccccaagcccaagatttcctggttcaagaatggcctggacctgggagaagacgcccgcttccgcatgttcagcaagcagggagtgttgactctggagattagaaagccctgcccctttgacgggggcatctatgtctgcagggccaccaacttacagggcgaggcacggtgtgagtgccgcctggaggtgcgagtgcctcagtgacctcgagccaataaaggatcgtttattttcattggaagcgtgtgttggttttttgatcaggcgcgtccaagcttgcggccgcaggaacccctagtgatggagttggccactccctctctgcgcgctcgctcgctcactgaggccgcccgggcaaagcccgggcgtcgggcgacctttggtcgcccggcctcagtgagcgagcgagcgcgcagagagggagtggccaa

SEQ ID NO: 168 - DNA, 4844 bp, synthetic construct
  source 1..4844: mol_type = other DNA
ctgcgcgctcgctcgctcactgaggccgggcgaccaaaggtcgcccgacgcccgggctttgcccgggcggcctcagtgagcgagcgagcgcgcagagagggagtggccaactccatcactaggggttcctgcggccgcctggaagatgtctttacccccagcatcagttcaagtggagcagcacataactcttgccctctgccttccaagattctggtgctgagacttatggagtgtcttggaggttgccttctgccccccaaccctgctcccagctggccctcccaggcctgggttgctggcctctgctttatcaggattctcaagagggacagctggtttatgttgcatgactgttccctgcatatctgctctggttttaaatagcttatctgagcagctggaggaccacatgggcttatatggcgtggggtacatgttcctgtagccttgtccctggcacctgccaaaatagcagccaacaccccccacccccaccgccatccccctgccccacccgtcccctgtcgcacattcctccctccgcagggctggctcaccaggccccagcccacatgcctgcttaaagccctctccatcctctgcctcacccagtccccgctgagactgagcagacgcctccaggatctgtcggcagctgctgttctgagccaccatgcctgagccggggaagaagccagtctcagcttttagcaagaagccacggtcagtggaagtggccgcaggcagccctgccgtgttcgaggccgagacagagcgggcaggagtgaaggtgcgctggcagcgcggaggcagtgacatcagcgccagcaacaagtacggcctggccacagagggcacacggcatacgctgacagtgcgggaagtgggccctgccgaccagggatcttacgcagtcattgctggctcctccaaggtcaagttcgacctcaaggtcatagaggcaggtaagtactagcagctacaatccagctaccattctgcttttattttatggttgggataaggctggattattctgagtccaagctaggcccttttgctaatcatgttcatacctcttatcttcctcccacagagaaggcagagcccatgctggcccctgcccctgcccctgctgaggccactggagcccctggagaagccccggccccagccgctgagctgggagaaagtgccccaagtcccaaagggtcaagctcagcagctctcaatggtcctacccctggagcccccgatgaccccattggcctcttcgtgatgcggccacaggatggcgaggtgaccgtgggtggcagcatcaccttctcagcccgcgtggccggcgccagcctcctgaagccgcctgtggtcaagtggttcaagggcaaatgggtggacctgagcagcaaggtgggccagcacctgcagctgcacgacagctacgaccgcgccagcaaggtctatctgttcgagctgcacatcaccgatgcccagcctgccttcactggcagctaccgctgtgaggtgtccaccaaggacaaatttgactgctccaacttcaatctcactgtccacgaggccatgggcaccggagacctggacctcctatcagccttccgccgcacgagcctggctggaggtggtcggcggatcagtgatagccatgaggacactgggattctggacttcagctcactgctgaaaaagagagacagtttccggaccccgagggactcgaagctggaggcaccagcagaggaggacgtgtgggagatcctacggcaggcacccccatctgagtacgagcgcatcgccttccagtacggcgtcactgacctgcgcggcatgctaaagaggctcaagggcatgaggcgcgatgagaagaagagcacagcctttcagaagaagctggagccggcctaccaggtgagcaaaggccacaagatccggctgaccgtggaactggctgaccatgacgctgaggtcaaatggctcaagaatggccaggagatccagatgagcggcagcaagtacatctttgagtccatcggtgccaagcgtaccctgaccatcagccagtgctcattggcggacgacgcagcctaccagtgcgtggtgggtggcgagaagtgtagcacggagctctttgtgaaagagccccctgtgctcatcacgcgccccttggaggaccagctggtgatggtggggcagcgggtggagtttgagtgtgaagtatcggaggagggggcgcaagtcaaatggctgaaggacggggtggagctgacccgggaggagaccttcaaataccggttcaagaaggacgggcagagacaccacctgatcatcaacgaggccatgctggaggacgcggggcactatgcactgtgcactagcgggggccaggcgctggctgagctcattgtgcaggaaaagaagctggaggtgtaccagagcatcgcagacctgatggtgggcgcaaaggaccaggcggtgttcaaatgtgaggtctcagatgagaatgttcggggtgtgtggctgaagaatgggaaggagctggtgcccgacagccgcataaaggtgtcccacatcgggcgggtccacaaactgaccattgacgacgtcacacctgccgacgaggctgactacagctttgtgcccgagggcttcgcctgcaacctgtcagccaagctccacttcatggaggtcaagattgacttcgtacccaggcaggaacctcccaagatccacctggactgcccaggccgcataccagacaccattgtggttgtagctggaaataagctacgtctggacgtccctatctctggggaccctgctcccactgtgatctggcagaaggctatcacgcaggggaataaggccccagccaggccagccccagatgccccagaggacacaggtgacagcgatgagtgggtgtttgacaagaagctgctgtgtgagaccgagggccgggtccgcgtggagaccaccaaggaccgcagcatcttcacggtcgagggggcagagaaggaagatgagggcgtctacacggtcacagtgaagaaccctgtgggcgaggaccaggtcaacctcacagtcaaggtcatcgacgtgccagacgcacctgcggcccccaagatcagcaacgtgggagaggactcctgcacagtacagtgggagccgcctgcctacgatggcgggcagcccatcctgggctacatcctggagcgcaagaagaagaagagctaccggtggatgcggctgaacttcgacctgattcaggagctgagtcatgaagcgcggcgcatgatcgagggcgtggtgtacgagatgcgcgtctacgcggtcaacgccatcggcatgtccaggcccagccctgcctcccagcccttcatgcctatcggtccccccagcgaacccacccacctggcagtagaggacgtctctgacaccacggtctccctcaagtggcggcccccagagcgcgtgggagcaggaggcctggatggctacagcgtggagtactgcccagagggctgctcagagtgggtggctgccctgcaggggctgacagagcacacatcgatactggtgaaggacctgcccacgggggcccggctgcttttccgagtgcgggcacacaatatggcagggcctggagcccctgttaccaccacggagccggtgacagtgcaggagatcctgcaacggccacggcttcagctgcccaggcacctgcgccagaccattcagaagaaggtcggggagcctgtgaaccttctcatccctttccagggcaagccccggcctcaggtgacctggaccaaagaggggcagcccctggcaggcgaggaggtgagcatccgcaacagccccacagacaccatcctgttcatccgggccgctcgccgcgtgcattcaggcacttaccaggtgacggtgcgcattgagaacatggaggacaaggccacgctggtgctgcaggttgttgacaagccaagtcctccccaggatctccgggtgactgacgcctggggtcttaatgtggctctggagtggaagccaccccaggatgtcggcaacacggagctctgggggtacacagtgcagaaagccgacaagaagaccatggagtggttcaccgtcttggagcattaccgccgcacccactgcgtggtgccagagctcatcattggcaatggctactacttccgcgtcttcagccagaatatggttggctttagtgacagagcggccaccaccaaggagcccgtctttatccccagaccaggcatcacctatgagccacccaactataaggccctggacttctccgaggccccaagcttcacccagcccctggtgaaccgctcggtcatcgcgggctacactgctatgctctgctgtgctgtccggggtagccccaagcccaagatttcctggttcaagaatggcctggacctgggagaagacgcccgcttccgcatgttcagcaagcagggagtgttgactctggagattagaaagccctgcccctttgacgggggcatctatgtctgcagggccaccaacttacagggcgaggcacggtgtgagtgccgcctggaggtgcgagtgcctcagtgacctcgagccaataaaggatcgtttattttcattggaagcgtgtgttggttttttgatcaggcgcgtccaagcttgcggccgcaggaacccctagtgatggagttggccactccctctctgcgcgctcgctcgctcactgaggccgggcgaccaaaggtcgcccgacgcccgggctttgcccgggcggcctcagtgagcgagcgagcgcgcag

SEQ ID NO: 169 - DNA, 4874 bp, synthetic construct
  source 1..4874: mol_type = other DNA
ttggccactccctctctgcgcgctcgctcgctcactgaggccgggcgaccaaaggtcgcccgacgcccgggctttgcccgggcggcctcagtgagcgagcgagcgcgcagagagggagtggccaactccatcactaggggttcctgcggccgcctggaagatgtctttacccccagcatcagttcaagtggagcagcacataactcttgccctctgccttccaagattctggtgctgagacttatggagtgtcttggaggttgccttctgccccccaaccctgctcccagctggccctcccaggcctgggttgctggcctctgctttatcaggattctcaagagggacagctggtttatgttgcatgactgttccctgcatatctgctctggttttaaatagcttatctgagcagctggaggaccacatgggcttatatggcgtggggtacatgttcctgtagccttgtccctggcacctgccaaaatagcagccaacaccccccacccccaccgccatccccctgccccacccgtcccctgtcgcacattcctccctccgcagggctggctcaccaggccccagcccacatgcctgcttaaagccctctccatcctctgcctcacccagtccccgctgagactgagcagacgcctccaggatctgtcggcagctgctgttctgagccaccatgcctgagccggggaagaagccagtctcagcttttagcaagaagccacggtcagtggaagtggccgcaggcagccctgccgtgttcgaggccgagacagagcgggcaggagtgaaggtgcgctggcagcgcggaggcagtgacatcagcgccagcaacaagtacggcctggccacagagggcacacggcatacgctgacagtgcgggaagtgggccctgccgaccagggatcttacgcagtcattgctggctcctccaaggtcaagttcgacctcaaggtcatagaggcaggtaagtactagcagctacaatccagctaccattctgcttttattttatggttgggataaggctggattattctgagtccaagctaggcccttttgctaatcatgttcatacctcttatcttcctcccacagagaaggcagagcccatgctggcccctgcccctgcccctgctgaggccactggagcccctggagaagccccggccccagccgctgagctgggagaaagtgccccaagtcccaaagggtcaagctcagcagctctcaatggtcctacccctggagcccccgatgaccccattggcctcttcgtgatgcggccacaggatggcgaggtgaccgtgggtggcagcatcaccttctcagcccgcgtggccggcgccagcctcctgaagccgcctgtggtcaagtggttcaagggcaaatgggtggacctgagcagcaaggtgggccagcacctgcagctgcacgacagctacgaccgcgccagcaaggtctatctgttcgagctgcacatcaccgatgcccagcctgccttcactggcagctaccgctgtgaggtgtccaccaaggacaaatttgactgctccaacttcaatctcactgtccacgaggccatgggcaccggagacctggacctcctatcagccttccgccgcacgagcctggctggaggtggtcggcggatcagtgatagccatgaggacactgggattctggacttcagctcactgctgaaaaagagagacagtttccggaccccgagggactcgaagctggaggcaccagcagaggaggacgtgtgggagatcctacggcaggcacccccatctgagtacgagcgcatcgccttccagtacggcgtcactgacctgcgcggcatgctaaagaggctcaagggcatgaggcgcgatgagaagaagagcacagcctttcagaagaagctggagccggcctaccaggtgagcaaaggccacaagatccggctgaccgtggaactggctgaccatgacgctgaggtcaaatggctcaagaatggccaggagatccagatgagcggcagcaagtacatctttgagtccatcggtgccaagcgtaccctgaccatcagccagtgctcattggcggacgacgcagcctaccagtgcgtggtgggtggcgagaagtgtagcacggagctctttgtgaaagagccccctgtgctcatcacgcgccccttggaggaccagctggtgatggtggggcagcgggtggagtttgagtgtgaagtatcggaggagggggcgcaagtcaaatggctgaaggacggggtggagctgacccgggaggagaccttcaaataccggttcaagaaggacgggcagagacaccacctgatcatcaacgaggccatgctggaggacgcggggcactatgcactgtgcactagcgggggccaggcgctggctgagctcattgtgcaggaaaagaagctggaggtgtaccagagcatcgcagacctgatggtgggcgcaaaggaccaggcggtgttcaaatgtgaggtctcagatgagaatgttcggggtgtgtggctgaagaatgggaaggagctggtgcccgacagccgcataaaggtgtcccacatcgggcgggtccacaaactgaccattgacgacgtcacacctgccgacgaggctgactacagctttgtgcccgagggcttcgcctgcaacctgtcagccaagctccacttcatggaggtcaagattgacttcgtacccaggcaggaacctcccaagatccacctggactgcccaggccgcataccagacaccattgtggttgtagctggaaataagctacgtctggacgtccctatctctggggaccctgctcccactgtgatctggcagaaggctatcacgcaggggaataaggccccagccaggccagccccagatgccccagaggacacaggtgacagcgatgagtgggtgtttgacaagaagctgctgtgtgagaccgagggccgggtccgcgtggagaccaccaaggaccgcagcatcttcacggtcgagggggcagagaaggaagatgagggcgtctacacggtcacagtgaagaaccctgtgggcgaggaccaggtcaacctcacagtcaaggtcatcgacgtgccagacgcacctgcggcccccaagatcagcaacgtgggagaggactcctgcacagtacagtgggagccgcctgcctacgatggcgggcagcccatcctgggctacatcctggagcgcaagaagaagaagagctaccggtggatgcggctgaacttcgacctgattcaggagctgagtcatgaagcgcggcgcatgatcgagggcgtggtgtacgagatgcgcgtctacgcggtcaacgccatcggcatgtccaggcccagccctgcctcccagcccttcatgcctatcggtccccccagcgaacccacccacctggcagtagaggacgtctctgacaccacggtctccctcaagtggcggcccccagagcgcgtgggagcaggaggcctggatggctacagcgtggagtactgcccagagggctgctcagagtgggtggctgccctgcaggggctgacagagcacacatcgatactggtgaaggacctgcccacgggggcccggctgcttttccgagtgcgggcacacaatatggcagggcctggagcccctgttaccaccacggagccggtgacagtgcaggagatcctgcaacggccacggcttcagctgcccaggcacctgcgccagaccattcagaagaaggtcggggagcctgtgaaccttctcatccctttccagggcaagccccggcctcaggtgacctggaccaaagaggggcagcccctggcaggcgaggaggtgagcatccgcaacagccccacagacaccatcctgttcatccgggccgctcgccgcgtgcattcaggcacttaccaggtgacggtgcgcattgagaacatggaggacaaggccacgctggtgctgcaggttgttgacaagccaagtcctccccaggatctccgggtgactgacgcctggggtcttaatgtggctctggagtggaagccaccccaggatgtcggcaacacggagctctgggggtacacagtgcagaaagccgacaagaagaccatggagtggttcaccgtcttggagcattaccgccgcacccactgcgtggtgccagagctcatcattggcaatggctactacttccgcgtcttcagccagaatatggttggctttagtgacagagcggccaccaccaaggagcccgtctttatccccagaccaggcatcacctatgagccacccaactataaggccctggacttctccgaggccccaagcttcacccagcccctggtgaaccgctcggtcatcgcgggctacactgctatgctctgctgtgctgtccggggtagccccaagcccaagatttcctggttcaagaatggcctggacctgggagaagacgcccgcttccgcatgttcagcaagcagggagtgttgactctggagattagaaagccctgcccctttgacgggggcatctatgtctgcagggccaccaacttacagggcgaggcacggtgtgagtgccgcctggaggtgcgagtgcctcagtgacctcgagccaataaaggatcgtttattttcattggaagcgtgtgttggttttttgatcaggcgcgtccaagcttgcggccgcaggaacccctagtgatggagttggccactccctctctgcgcgctcgctcgctcactgaggccgggcgaccaaaggtcgcccgacgcccgggctttgcccgggcggcctcagtgagcgagcgagcgcgcagagagggagtggccaa
